(19) United States
(12) Patent Application Publication
(10) Pub. No.: US 2023/0279394 A1
(43) Pub. Date: Sep. 7, 2023

(54) COMPOSITIONS AND METHODS FOR THE TREATMENT OF HEMOGLOBINOPATHIES

(71) Applicant: Novartis AG, Basel (CH)

(72) Inventors: Muluken BELEW, Hannon (CA); Simone BONAZZI, Cambridge, MA (US); James BRADNER, Weston, MA (US); Artiom CERNIJENKO, Cambridge, MA (US); Jennifer Stroka COBB, Stow, MA (US); Natalie DALES, Arlington, MA (US); John Ryan KERRIGAN, Wakefield, MA (US); Philip LAM, Reading, MA (US); Hasnain Ahmed MALIK, Boston, MA (US); Carsten RUSS, Arlington, MA (US); Frederic SIGOILLOT, Waltham, MA (US); Susan C. STEVENSON, Ashland, MA (US); Noel Marie-France THOMSEN, Chelmsford, MA (US); Pamela TING, Somerville, MA (US)

(21) Appl. No.: 17/786,347

(22) PCT Filed: Dec. 16, 2020
(86) PCT No.: PCT/IB2020/001098

§ 371 Date: Jun. 16, 2022

Related U.S. Application Data
(60) Provisional application No. 62/950,025, filed on Dec. 18, 2019.
(60) Provisional application No. 62/950,048, filed on Dec. 18, 2019.

(51) Int. Cl. C12N 15/113; C12N 15/86; C12N 5/07; A61P 7/00

(52) U.S. Cl. CPC C12N 15/113; A61P 7/00; C12N 5/06; C12N 15/86; C12N 2310/20

(57) ABSTRACT

The present invention is directed to compositions and methods for the treatment of hemoglobinopathies.

### SEQUENCE LISTING

[0001] The instant application contains a Sequence Listing which has been submitted electronically in ASCII format and is hereby incorporated by reference in its entirety. Said ASCII copy, created on Dec. 16, 2020, is named PAT058744-WO-PCT_SL.txt and is 1,094,185 bytes in size.

### CLAIM OF PRORITY

[0002] This application claims the benefit of priority to U.S. Provisional Application Nos. 62/950,025 and 62/950,048 filed Dec. 18, 2019, the disclosure of each of which is incorporated by reference herein in its entirety.

### BACKGROUND

[0003] CRISPRs (Clustered Regularly Interspaced Short Palindromic Repeats) evolved in bacteria as an adaptive immune system to defend against viral attack. Upon exposure to a virus, short segments of viral DNA are integrated into the CRISPR locus of the bacterial genome. RNA is transcribed from a portion of the CRISPR locus that includes the viral sequence. That RNA, which contains sequence that is complimentary to the viral genome, mediates targeting of a Cas9 protein to the sequence in the viral genome. The Cas9 protein cleaves and thereby silences the viral target.

[0004] Recently, the CRISPR/Cas system has been adapted for genome editing in eukaryotic cells. The introduction of site-specific single (SSBs) or double strand breaks (DSBs) allows for target sequence alteration through, for example, non-homologous end-joining (NHEJ) or homology-directed repair (HDR).

### SUMMARY OF THE INVENTION

[0005] Without being bound by theory, the invention here is based in part on the surprising finding of the linkage between WIZ gene expression/protein activity and the hemoglobin F (HbF) production. As demonstrated in the examples and figures, knocking down or knocking out WIZ gene or WIZ protein in cells (by various modalities/compostions described herein) significantly increased HbF induction in those cells, thereby treating HbF-associated conditions and disorders (e.g., hemoglobinopathies, e.g., sickle cell disease and beta thalassemia). The invention is also based in part on the discovery that CRISPR systems, e.g., Cas9 CRISPR systems, e.g., as described herein, can be used to modify cells (e.g., hematopoietic stem and progenitor cells (HSPCs)), for example, at WIZ gene, as described herein, to increase fetal hemoglobin (HbF) expression and/or decrease expression of beta globin (e.g., a beta globin gene having a disease-causing mutation), for example in progeny, for example red blood cell progeny, of the modified cells, and that the modified cells (e.g., modified HSPCs) may be used to treat hemoglobinopathies, e.g., sickle cell disease and beta thalassemia. In one aspect, it has surprisingly been shown herein that introdution of gene editing systems, e.g., CRISPR systems, e.g., as described herein, to cells (e.g., HSPCs), that target WIZ gene to create modified HSPCs (e.g., HSPCs that comprise one or more indels, for example, as described herein) that are able to efficiently engraft into an organism, persist long-term in the engrafted organism, and differentiate, including into erythrocytes with increased fetal hemoblobin expression. In addition, these modified HSPCs are capable of being cultured ex vivo, for example, in the presence of a stem cell expander (for example as described herein) under conditions that cause them to expand and proliferate while maintaining stemness. When the gene editing systems, e.g., CRISPR systems, e.g, as described herein, are introduced into HPSCs derived from sickle cell disease patients, the modified cells and their progeny (e.g., erythroid progeny) surprisingly show not only upregulation of fetal hemoglobin, but also show a significant decrease in sickle beta-globin, and a significant decrease in the number of sickle cells and increase the number of normal red blood cells, relative to unmodified cell populations.

[0006] Thus, in an aspect, the invention provides CRISPR systems (e.g., Cas CRISPR systems, e.g., Cas9 CRISPR systems, e.g., S.pyogenes Cas9 CRISPR systems) comprising one or more, e.g., one, gRNA molecule as described herein. Any of the gRNA molecules described herein may be used in such systems, and in the methods and cells described herein.

[0007] In an aspect, the invention provides a gRNA molecule including a tracr and crRNA, wherein the crRNA includes a targeting domain that is complementary with a target sequence of WIZ gene (e.g., a human WIZ gene). In embodiments, the WIZ gene includes genomic nucleic acid sequence at Chr19:15419978-15451624, - strand, hg38, or a fragment thereof or a variant thereof.

[0008] In embodiments, the targeting domain includes, e.g., consists of, any one of SEQ ID NO: 1 to SEQ ID NO: 3106 (see, e.g., Tables 1-3). In embodiments, the gRNA molecule includes a targeting domain which includes (e.g., consists of) a fragment of any of the sequences above.

[0009] In any of the aspects and embodiments described herein, the gRNA molecule may further have regions and/or properties described herein. In embodiments, the gRNA molecule includes a fragment of any of the targeting domains described herein. In embodiments, the targeting domain includes, e.g., consists of, 17, 18, 19, or 20 consecutive nucleic acids of any one of the recited targeting domain sequences. In embodiments, the 17, 18, 19, or 20 consecutive nucleic acids of any one of the recited targeting domain sequences are the 17, 18, 19, or 20 consecutive nucleic acids disposed at the 3′ end of the recited targeting domain sequence. In other embodiments, the 17, 18, 19, or 20 consecutive nucleic acids of any one of the recited targeting domain sequences are the 17, 18, 19, or 20 consecutive nucleic acids disposed at the 5′ end of the recited targeting domain sequence. In other embodiments, the 17, 18, 19, or 20 consecutive nucleic acids of any one of the recited targeting domain sequences do not include either the 5′ or 3′ nucleic acid of the recited targeting domain sequence. In embodiments, the targeting domain consists of the recited targeting domain sequence.

[0010] In an aspect, including in any of the aspects and embodiments described herein, a portion of the crRNA and a portion of the tracr hybridize to form a flagpole including SEQ ID NO: 3110 or 3111. In an aspect, including in any of the aspects and embodiments described herein, the flagpole further includes a first flagpole extension, located 3′ to the crRNA portion of the flagpole, wherein said first flagpole extension includes SEQ ID NO: 3112. In an aspect, including in any of the aspects and embodiments described herein, the flagpole further includes a second flagpole extension located 3′ to the crRNA portion of the flagpole and, if present, the first flagpole extension, wherein said second flagpole extension includes SEQ ID NO: 3113.

[0011] In an aspect, including in any of the aspects and embodiments described herein, the tracr includes SEQ ID NO: 3152 or SEQ ID NO: 3153. In an aspect, including in any of the aforementioned aspects and embodiments, the tracr includes SEQ ID NO: 3160, optionally further including, at the 3′ end, an additional 1, 2, 3, 4, 5, 6, or 7 uracil (U) nucleotides. In an aspect, including in any of the aspects and embodiments described herein, the crRNA includes, from 5′ to 3′, [targeting domain]-: a) SEQ ID NO:3110; b) SEQ ID NO: 3111; c) SEQ ID NO: 3127; d) SEQ ID NO: 3128; e) SEQ ID NO: 3129; f) SEQ ID NO: 3130; or g) SEQ ID NO: 3154.

[0012] In an aspect, including in any of the aforementioned aspects and embodiments, the tracr includes, from 5′ to 3′: a) SEQ ID NO: 3115; b) SEQ ID NO: 3116; c) SEQ ID NO: 3131; d) SEQ ID NO: 3132; e) SEQ ID NO: 3152; f) SEQ ID NO: 3153; g) SEQ ID NO: 232; h) SEQ ID NO: 3155; i) (SEQ ID NO: 3156; j) SEQ ID NO: 3157; k) any of a) to j), above, further including, at the 3′ end, at least 1, 2, 3, 4, 5, 6 or 7 uracil (U) nucleotides, e.g., 1, 2, 3, 4, 5, 6, or 7 uracil (U) nucleotides; 1) any of a) to k), above, further including, at the 3′ end, at least 1, 2, 3, 4, 5, 6 or 7 adenine (A) nucleotides, e.g., 1, 2, 3, 4, 5, 6, or 7 adenine (A) nucleotides; or m) any of a) to 1), above, further including, at the 5′ end (e.g., at the 5′ terminus), at least 1, 2, 3, 4, 5, 6 or 7 adenine (A) nucleotides, e.g., 1, 2, 3, 4, 5, 6, or 7 adenine (A) nucleotides.

[0013] In an aspect, including in any of the aspects and embodiments described herein, the targeting domain and the tracr are disposed on separate nucleic acid molecules. In an aspect, including in any of the aspects and embodiments described herein, the targeting domain and the tracr are disposed on separate nucleic acid molecules, and the nucleic acid molecule including the targeting domain includes SEQ ID NO: 3129, optionally disposed immediately 3′ to the targeting domain, and the nucleic acid molecule including the tracr includes, e.g., consists of, SEQ ID NO: 3152. In an aspect, including in any of the aforementioned aspects and embodiments, the crRNA portion of the flagpole includes SEQ ID NO: 3129 or SEQ ID NO: 3130. In an aspect, including in any of the aforementioned aspects and embodiments, the tracr includes SEQ ID NO: 3115 or 3116, and optionally, if a first flagpole extension is present, a first tracr extension, disposed 5′ to SEQ ID NO: 3115 or 3116, said first tracr extension including SEQ ID NO: 3117.

[0014] In an aspect, including in any of the aforementioned aspects and embodiments, the targeting domain and the tracr are disposed on a single nucleic acid molecule, for example, wherein the tracr is disposed 3 to the targeting domain. In an aspect, the gRNA molecule includes a loop, disposed 3′ to the targeting domain and 5′ to the tracr. In embodiments, the loop includes SEQ ID NO: 3114. In an aspect, including in any of the aforementioned aspects and embodiments, the gRNA molecule includes, from 5′ to 3′, [targeting domain]-: (a) SEQ ID NO: 3123; (b) SEQ ID NO: 3124; (c) SEQ ID NO: 3125; (d) SEQ ID NO: 3126; (e) SEQ ID NO: 3159; or (f) any of (a) to (e), above, further including, at the 3′ end, 1, 2, 3, 4, 5, 6 or 7 uracil (U) nucleotides.

[0015] In an aspect, including in any of the aforementioned aspects and embodiments, the targeting domain and the tracr are disposed on a single nucleic acid molecule, and wherein said nucleic acid molecule includes, e.g., consists of, said targeting domain and SEQ ID NO: 3159, optionally disposed immediately 3 to said targeting domain.

[0016] In an aspect, including in any of the aforementioned aspects and embodiments, one, or optionally more than one, of the nucleic acid molecules including the gRNA molecule includes:
[0017] a) one or more, e.g., three, phosphorothioate modifications at the 3 end of said nucleic acid molecule or molecules;
[0018] b) one or more, e.g., three, phosphorothioate modifications at the 5′ end of said nucleic acid molecule or molecules;
[0019] c) one or more, e.g., three, 2′—O—methyl modifications at the 3′ end of said nucleic acid molecule or molecules;
[0020] d) one or more, e.g., three, 2′—O—methyl modifications at the 5′ end of said nucleic acid molecule or molecules;
[0021] e) a 2′ O-methyl modification at each of the 4^{th}-to-terminal, 3^{rd}-to-terminal, and 2^{nd}-to-terminal 3′ residues of said nucleic acid molecule or molecules;
[0022] f) a 2′ O-methyl modification at each of the 4^{th}-to-terminal, 3^{rd}-to-terminal, and 2^{nd}-to-terminal 5′ residues of said nucleic acid molecule or molecules; or
[0023] f) any combination thereof.

[0024] In an aspect, including in any of the aforementioned aspects and embodiments the invention provides a gRNA molecule, wherein:

[0025] when a CRISPR system (e.g., an RNP as described herein) including the gRNA molecule is introduced into a cell, an indel is formed at or near the target sequence complementary to the targeting domain of the gRNA molecule.

[0026] In an aspect, including in any of the aforementioned aspects and embodiments, the invention provides a gRNA molecule, wherein when a CRISPR system (e.g., an RNP as described herein) including the gRNA molecule is introduced into a population of cells, an indel is formed at or near the target sequence complementary to the targeting domain of the gRNA molecule in at least about 15%, e.g., at least about 17%, e.g., at least about 20%, e.g., at least about 30%, e.g., at least about 40%, e.g., at least about 50%, e.g., at least about 55%, e.g., at least about 60%, e.g., at least about 70%, e.g., at least about 75%, of the cells of the population. In an aspect, including in any of the aforementioned aspects and embodiments, the indel includes at least one nucleotide of a WIZ gene region. In embodiments, at least about 15% of the cells of the population include an indel which includes at least one nucleotide of a WIZ gene region. In embodiments, the indel is as measured by next generation sequencing (NGS).

[0027] In an aspect, including in any of the aforementioned aspects and embodiments, the invention provides a gRNA molecule, wherein when a CRISPR system (e.g., an RNP as described herein) including the gRNA molecule is introduced into a cell, expression of fetal hemoglobin is increased in said cell or its progeny, e.g., its erythroid progeny, e.g., its red blood cell progeny. In embodiments, when a CRISPR system (e.g., an RNP as described herein) including the gRNA molecule is introduced into a population of cells, the percentage of F cells in said population or population of its progeny, e.g., its erythroid progeny, e.g., its red blood cell progeny, is increased by at least about 15%, e.g., at least about 17%, e.g., at least about 20%, e.g., at least about 25%, e.g., at least about 30%, e.g., at least about 35%, e.g., at least about 40%, relative to the percentage of F cells in a population of cells to which the gRNA molecule was not introduced or a population of its progeny, e.g., its erythroid progeny, e.g., its red blood cell progeny. In embodiments, said cell or its progeny, e.g., its erythroid progeny, e.g., its red blood cell progeny, produces at least about 6 picograms (e.g., at least about 7 picograms, at least about 8 picograms, at least about 9 picograms, at least about 10 picograms, or from about 8 to about 9 picograms, or from about 9 to about 10 picograms) fetal hemoglobin per cell.

[0028] In an aspect, including in any of the aforementioned aspects and embodiments, the invention provides a gRNA molecule, wherein when a CRISPR system (e.g., an RNP as described herein) including the gRNA molecule is introduced into a cell, no off-target indels are formed in said cell, e.g., no off-target indels are formed outside of the WIZ gene region (e.g., within a gene, e.g., a coding region of a gene), e.g., as detectible by next generation sequencing and/or a nucleotide insertional assay.

[0029] In an aspect, including in any of the aforementioned aspects and embodiments, the invention provides a gRNA molecule, wherein when a CRISPR system (e.g., an RNP as described herein) including the gRNA molecule is introduced into a population of cells, no off-target indel, e.g., no off-target indel outside of the the WIZ gene (e.g., within a gene, e.g., a coding region of a gene), is detected in more than about 5%, e.g., more than about 1%, e.g., more than about 0.1%, e.g., more than about 0.01%, of the cells of the population of cells, e.g., as detectible by next generation sequencing and/or a nucleotide insertional assay.

[0030] In an aspect, including of any of the aforementioned aspects and embodiments, the cell is (or population of cells includes) a mammalian, primate, or human cell, e.g., is a human cell, e.g., the cell is (or population of cells includes) an HSPC, e.g., the HSPC is CD34+, e.g., the HSPC is CD34+CD90+. In embodiments, the cell is autologous with respect to a patient to be administered said cell. In other embodiments, the cell is allogeneic with respect to a patient to be administered said cell.

[0031] In an aspect, the gRNA molecules, genome editing systems (e.g., CRISPR systems), and/or methods described herein relate to cells, e.g., as described herein, that include or result in one or more of the following properties:
[0032] (a) at least about 40%, at least about 50%, at least about 60%, at least about 70%, at least about 80%, at least about 90%, at least about 95%, at least about 96%, at least about 97%, at least about 98% or at least about 99% of the cells of a population of cells described herein comprise an indel at or near a genomic DNA sequence complementary to the targeting domain of a gRNA molecule described herein;
[0033] (b) a cell (e.g., population of cells) described herein is capable of differentiating into a differentiated cell of an erythroid lineage (e.g., a red blood cell), and wherein said differentiated cell exhibits an increased level of fetal hemoglobin, e.g., relative to an unaltered cell (e.g., population of cells);
[0034] (c) a population of cells described herein is capable of differentiating into a population of differentiated cells, e.g., a population of cells of an erythroid lineage (e.g., a population of red blood cells), and wherein said population of differentiated cells has an increased percentage of F cells (e.g., at least about 15%, at least about 20%, at least about 25%, at least about 30%, or at least about 40% higher percentage of F cells) e.g., relative to a population of unaltered cells;
[0035] (d) a cell (e.g., population of cells) described herein is capable of differentiating into a differentiated cell, e.g., a cell of an erythroid lineage (e.g., a red blood cell), and wherein said differentiated cell (e.g., population of differentiated cells) produces at least about 6 picograms (e.g., at least about 7 picograms, at least about 8 picograms, at least about 9 picograms, at least about 10 picograms, or from about 8 to about 9 picograms, or from about 9 to about 10 picograms) fetal hemoglobin per cell;
[0036] (e) no off-target indels are formed in a cell described herein, e.g., no off-target indels are formed outside of the WIZ gene region (e.g., within a gene, e.g., a coding region of a gene), e.g., as detectible by next generation sequencing and/or a nucleotide insertional assay;
[0037] (f) no off-target indel, e.g., no off-target indel outside of the WIZ gene region (e.g., within a gene, e.g., a coding region of a gene), is detected in more than about 5%, e.g., more than about 1%, e.g., more than about 0.1%, e.g., more than about 0.01%, of the cells of a population of cells described herein, e.g., as detectible by next generation sequencing and/or a nucleotide insertional assay;
[0038] (g) a cell described herein or its progeny is detectable, e.g., detectable in the bone marrow or detectable in the peripheral blood, in a patient to which it is transplanted at more than 16 weeks, more than 20 weeks or more than 24 weeks after transplantation, optionally as detected by detecting an indel at or near a genomic DNA sequence complementary to the targeting domain of a gRNA molecule of any of SEQ ID NO: 1 to SEQ ID NO: 3106, optionally wherein the indel is a large deletion indel;
[0039] (h) a population of cells described herein is capable of differentiating into a population of differentiated cells, e.g., a population of cells of an erythroid lineage (e.g., a population of red blood cells), and wherein said population of differentiated cells includes a reduced percentage of sickle cells (e.g., at least about 15%, at least about 20%, at least about 25%, at least about 30%, at least about 40%, at least about 50%, at least about 60%, at least about 70%, at least about 80%, or at least about 90% lower percentage of sickle cells) e.g., relative to a population of unaltered cells; and/or
[0040] (i) a cell or population of cells described herein is capable of differentiating into a population of differentiated cells, e.g., a population of cells of an erythroid lineage (e.g., a population of red blood cells), and wherein said population of differentiated cells includes cells which produce a reduced level (e.g., at least about 15%, at least about 20%, at least about 25%, at least about 30%, at least about 40%, at least about 50%, at least about 60%, at least about 70%, at least about 80%, or at least about 90% lower level) of sickle hemoglobin (HbS), e.g., relative to a populaiton of unaltered cells.

[0041] In an aspect, the invention provides a composition including:
[0042] 1) one or more gRNA molecules (including a first gRNA molecule) described herein, e.g., of any of the aforementioned gRNA aspects and embodiments, and a Cas9 molecule, e.g., described herein;
[0043] 2) one or more gRNA molecules (including a first gRNA molecule) described herein, e.g., of any of the aforementioned gRNA aspects and embodiments, and nucleic acid comprising a nucleotide sequence encoding a Cas9 molecule, e.g., described herein;
[0044] 3) nucleic acid comprising one or more nucleotide sequences each encoding one gRNA molecule (including a first gRNA molecule) described herein, e.g., of any of the aforementioned gRNA aspects and embodiments, and a Cas9 molecule, e.g., described herein;
[0045] 4) nucleic acid comprising one or more nucleotide sequences each encoding one gRNA molecule (including a first gRNA molecule) described herein, e.g., of any of the aforementioned gRNA aspects and embodiments, and nucleic acid encoding a Cas9 molecule, e.g., described herein; or
[0046] 5) any of 1) to 4), above, and a template nucleic acid; or
[0047] 6) any of 1) to 4) above, and nucleic acid including a nucleotide sequence encoding a template nucleic acid.

[0048] In an aspect, the invention provides a composition including a first gRNA molecule described herein, e.g., of any of the aforementioned gRNA aspects and embodiments, further including a Cas9 molecule, e.g., described herein, e.g., wherein the Cas9 molecule is an active or inactive s. pyogenes Cas9, for example, wherein the Cas9 molecule includes SEQ ID NO: 3133. In aspects, the Cas9 molecule includes, e.g., consists of: (a) SEQ ID NO: 3161; (b) SEQ ID NO: 3162; (c) SEQ ID NO: 3163; (d) SEQ ID NO: 3164; (e) SEQ ID NO: 3165; (f) SEQ ID NO: 3166; (g) SEQ ID NO: 3167; (h) SEQ ID NO: 3168; (i) SEQ ID NO: 3169; (j) SEQ ID NO: 3170; (k) SEQ ID NO: 3171 or (1) SEQ ID NO: 3172.

[0049] In an aspect, including in any of the aforementioned composition aspects and embodiments, the first gRNA molecule and Cas9 molecule are present in a ribonuclear protein complex (RNP).

[0050] In an aspect, including in any of the aforementioned composition aspects and embodiments, the invention provides a composition further including a second gRNA molecule; a second gRNA molecule and a third gRNA molecule; or a second gRNA molecule, optionally, a third gRNA molecule, and, optionally, a fourth gRNA molecule, wherein the second gRNA molecule, the optional third gRNA molecule, and the optional fourth gRNA molecule are a gRNA molecule described herein, e.g., are a gRNA molecule of any of the aforementioned gRNA molecule aspects and embodiments, and wherein each gRNA molecule of the composition is complementary to a different target sequence. In embodiments, two or more of the first gRNA molecule, the second gRNA molecule, the optional third gRNA molecule, and the optional fourth gRNA molecule are complementary to target sequences within the same gene or region. In embodiments, the first gRNA molecule, the second gRNA molecule, the optional third gRNA molecule, and the optional fourth gRNA molecule are complementary to target sequences not more than 6000 nucleotides, not more than 5000 nucleotides, not more than 500, not more than 400 nucleotides, not more than 300, not more than 200 nucleotides, not more than 100 nucleotides, not more than 90 nucleotides, not more than 80 nucleotides, not more than 70 nucleotides, not more than 60 nucleotides, not more than 50 nucleotides, not more than 40 nucleotides, not more than 30 nucleotides, not more than 20 nucleotides or not more than 10 nucleotides apart. In an aspect, including in any of the aforementioned composition aspects and embodiments, the composition includes (e.g., consists of) a first gRNA molecule and a second gRNA molecule, wherein the first gRNA molecule and second gRNA molecule are: (a) independently selected and are complementary to different target sequences; (b) independently selected from the gRNA molecules of Table 1, and are complementary to different target sequences; c) independently selected from the gRNA molecules of Table 2, and are complementary to different target sequences; or (d) independently selected from the gRNA molecules of Table 3 and are complementary to different target sequences, or (f) independently selected from the gRNA molecules of any of the aforementioned aspects and embodiments, and are complementary to different target sequences.

[0051] In an aspect, including in any of the aforementioned composition aspects and embodiments, the composition includes a first gRNA molecule and a second gRNA molecule, wherein:
[0052] a) the first gRNA molecule is complementary to a target sequence including at least 1 nucleotide (e.g., including 20 consecutive nucleotides) within: Chr19:15419978-15451624, - strand, hg38;
[0053] b) the second gRNA molecule is complementary to a target sequence including at least 1 nucleotide (e.g., comprising 20 consecutive nucleotides) within: Chr19:15419978-15451624, - strand, hg38.

[0054] In an aspect, with respect to the gRNA molecule components of the composition, the composition consists of a first gRNA molecule and a second gRNA molecule.

[0055] In an aspect, including in any of the aforementioned composition aspects and embodiments, each of said gRNA molecules is in a ribonuclear protein complex (RNP) with a Cas9 molecule, e.g., described herein.

[0056] In an aspect, including in any of the aforementioned composition aspects and embodiments, the composition includes a template nucleic acid, wherein the template nucleic acid includes a nucleotide that corresponds to a nucleotide at or near the target sequence of the first gRNA molecule. In embodiments, the template nucleic acid includes nucleic acid encoding: human WIZ gene, or fragment thereof.

[0057] In an aspect, including in any of the aforementioned composition aspects and embodiments, the composition is formulated in a medium suitable for electroporation.

[0058] In an aspect, including in any of the aforementioned composition aspects and embodiments, each of said gRNA molecules of said composition is in a RNP with a Cas9 molecule described herein, and wherein each of said RNP is at a concentration of less than about 10 uM, e.g., less than about 3 uM, e.g., less than about 1 uM, e.g., less than about 0.5 uM, e.g., less than about 0.3 uM, e.g., less than about 0.1 uM. In embodiments, the RNP is at a concentration of about 1 uM. In embodiments, the RNP is at a concentration of about 2 uM. In embodiments, said concentration is the concentration of RNP in a composition comprising the cells, e.g., as described herein, optionally wherein the composition comprising the cells and the RNP is suitable for electroporation.

[0059] In an aspect, the invention provides a nucleic acid sequence that encodes one or more gRNA molecules described herein, e.g., of any of the aforementioned gRNA molecule aspects and embodiments. In embodiments, the nucleic acid includes a promoter operably linked to the sequence that encodes the one or more gRNA molecules, for example, the promoter is a promoter recognized by an RNA polymerase II or RNA polymerase III, or, for example, the promoter is a U6 promoter or an HI promoter.

[0060] In an aspect, including in any of the aforementioned nucleic acid aspects and embodiments, the nucleic acid further encodes a Cas9 molecule, for example, a Cas9 molecule that includes, e.g., consists of, any of SEQ ID NO: 3133, (a) SEQ ID NO: 3161; (b) SEQ ID NO: 3162; (c) SEQ ID NO: 3163; (d) SEQ ID NO: 3164; (e) SEQ ID NO: 3165; (f) SEQ ID NO: 3166; (g) SEQ ID NO: 3167; (h) SEQ ID NO: 3168; (i) SEQ ID NO: 3169; (j) SEQ ID NO: 3170; (k) SEQ ID NO: 3171 or (1) SEQ ID NO: 3172. In embodiments, said nucleic acid includes a promoter operably linked to the sequence that encodes a Cas9 molecule, for example, an EF-1 promoter, a CMV IE gene promoter, an EF-1α promoter, an ubiquitin C promoter, or a phosphoglycerate kinase (PGK) promoter.

[0061] In an aspect, provided herein includes a vector including the nucleic acid of any of the aforementioned nucleic acid aspects and embodiments. In embodiments, the vector is selected from the group consisting of a lentiviral vector, an adenoviral vector, an adeno-associated viral (AAV) vector, a herpes simplex virus (HSV) vector, a plasmid, a minicircle, a nanoplasmid, and an RNA vector.

[0062] In an aspect, provided herein includes a method of altering a cell (e.g., a population of cells), (e.g., altering the structure (e.g., sequence) of nucleic acid) at or near a target sequence within said cell, including contacting (e.g., introducing into) said cell (e.g., population of cells) with:
[0063] 1) one or more gRNA molecules described herein (e.g., of any of the aforementioned gRNA molecule aspects and embodiments) and a Cas9 molecule, e.g., described herein;
[0064] 2) one or more gRNA molecules described herein (e.g., of any of the aforementioned gRNA molecule aspects and embodiments) and nucleic acid comprising a nucelotide sequence encoding a Cas9 molecule, e.g., described herein;
[0065] 3) nucleic acid comprising one or more nucleotide sequences each encoding one gRNA molecule described herein (e.g., of any of the aforementioned gRNA molecule aspects and embodiments) and a Cas9 molecule, e.g., described herein;
[0066] 4) nucleic acid comprising one or more nucleotide sequences each encoding one gRNA molecule described herein (e.g., of any of the aforementioned gRNA molecule aspects and embodiments) and nucleic acid comprising a nucelotide sequence encoding a Cas9 molecule, e.g., described herein;
[0067] 5) any of 1) to 4), above, and a template nucleic acid;
[0068] 6) any of 1) to 4) above, and nucleic acid including a nucleotide sequence encoding a template nucleic acid;
[0069] 7) a composition described herein, e.g., a composition of any of the aforementioned composition aspects and embodiments; or
[0070] 8) a vector described herein, e.g., a vector of any of the aforementioned vector aspects and embodiments.

[0071] In an aspect, including in any of the aforementioned method aspects and embodiments, the gRNA molecule or nucleic acid encoding the gRNA molecule, and the Cas9 molecule or nucleic acid encoding the Cas9 molecule, are formulated in a single composition. In another aspect, the gRNA molecule or nucleic acid encoding the gRNA molecule, and the Cas9 molecule or nucleic acid encoding the Cas9 molecule, are formulated in more than one composition. In an aspect, the more than one composition are delivered simultaneously or sequentially.

[0072] In an aspect of the methods described herein, including in any of the aforementioned method aspects and embodiments, the cell is an animal cell, for example, the cell is a mammalian, primate, or human cell, for example, the cell is a hematopoietic stem or progenitor cell (HSPC) (e.g., a population of HSPCs), for example, the cell is a CD34+ cell, for example, the cell is a CD34+CD90+ cell. In embodiments of the methods described herein, the cell is disposed in a composition including a population of cells that has been enriched for CD34+ cells. In embodiments of the methods described herein, the cell (e.g. population of cells) has been isolated from bone marrow, mobilized peripheral blood, or umbilical cord blood. In embodiments of the methods described herein, the cell is autologous or allogeneic, e.g., autologous, with respect to a patient to be administered said cell.

[0073] In an aspect of the methods described herein, including in any of the aforementioned method aspects and embodiments, a) the altering results in an indel at or near a genomic DNA sequence complementary to the targeting domain of the one or more gRNA molecules; or b) the altering results in a deletion including sequence, e.g., substantially all the sequence, complementary to the targeting domain of the one or more gRNA molecules (e.g., at least 90% complementary to the gRNA targeting domain, e.g., fully complementary to the gRNA targeting domain) in the WIZ gene region. In aspects of the method, the indel is an insertion or deletion of less than about 40 nucleotides, e.g., less than 30 nucleotides, e.g., less than 20 nucleotides, e.g., less than 10 nucleotides, for example, is a single nucleotide deletion.

[0074] In an aspect of the methods described herein, including in any of the aforementioned method aspects and embodiments, the method results in a population of cells wherein at least about 15%, e.g., at least about 17%, e.g., at least about 20%, e.g., at least about 30%, e.g., at least about 40%, e.g., at least about 50%, e.g., at least about 55%, e.g., at least about 60%, e.g., at least about 70%, e.g., at least about 75% of the population have been altered, e.g., include an indel.

[0075] In an aspect of the methods described herein, including in any of the aforementioned method aspects and embodiments, the altering results in a cell (e.g., population of cells) that is capable of differentiating into a differentiated cell of an erythroid lineage (e.g., a red blood cell), and wherein said differentiated cell exhibits an increased level of fetal hemoglobin, e.g., relative to an unaltered cell (e.g., population of cells).

[0076] In an aspect of the methods described herein, including in any of the aforementioned method aspects and embodiments, the altering results in a population of cells that is capable of differentiating into a population of differentiated cells, e.g., a population of cells of an erythroid lineage (e.g., a population of red blood cells), and wherein said population of differentiated cells has an increased percentage of F cells (e.g., at least about 15%, at least about 20%, at least about 25%, at least about 30%, or at least about 40% higher percentage of F cells) e.g., relative to a population of unaltered cells.

[0077] In an aspect of the methods described herein, including in any of the aforementioned method aspects and embodiments, the altering results in a cell that is capable of differentiating into a differentiated cell, e.g., a cell of an erythroid lineage (e.g., a red blood cell), and wherein said differentiated cell produces at least about 6 picograms (e.g., at least about 7 picograms, at least about 8 picograms, at least about 9 picograms, at least about 10 picograms, or from about 8 to about 9 picograms, or from about 9 to about 10 picograms) fetal hemoglobin per cell.

[0078] In an aspect, the invention provides a cell, altered by a method described herein, for example, a method of any of the aforementioned method aspects and embodiments.

[0079] In an aspect, the invention provides a cell, obtainable by a method described herein, for example, a method of any of the aforementioned method aspects and embodiments.

[0080] In an aspect, the invention provides a cell, including a first gRNA molecule described herein, e.g., of any of the aforementioned gRNA molecule aspects or embodiments, or a composition described herein, e.g., of any of the aforementioned composition aspects or embodiments, a nucleic acid described herein, e.g., of any of the aforementioned nucleic acid aspects or embodiments, or a vector described herein, e.g., of any of the aforementioned vector aspects or embodiments.

[0081] In an aspect of the cell described herein, including in any of the aforementioned cell aspects and embodiments, the cell further includes a Cas9 molecule, e.g., described herein, e.g., a Cas9 molecule that includes any one of SEQ ID NO: 3133, (a) SEQ ID NO: 3161; (b) SEQ ID NO: 3162; (c) SEQ ID NO: 3163; (d) SEQ ID NO: 3164; (e) SEQ ID NO: 3165; (f) SEQ ID NO: 3166; (g) SEQ ID NO: 3167; (h) SEQ ID NO: 3168; (i) SEQ ID NO: 3169; (j) SEQ ID NO: 3170; (k) SEQ ID NO: 3171 or (1) SEQ ID NO: 3172.

[0082] In an aspect of the cell described herein, including in any of the aforementioned cell aspects and embodiments, the cell includes, has included, or will include a second gRNA molecule described herein, e.g., of any of the aforementioned gRNA molecule aspects or embodiments, or nucleic acid encoding said gRNA molecule, wherein the first gRNA molecule and second gRNA molecule include nonidentical targeting domains.

[0083] In an aspect of the cell described herein, including in any of the aforementioned cell aspects and embodiments, expression of fetal hemoglobin is increased in said cell or its progeny (e.g., its erythroid progeny, e.g., its red blood cell progeny) relative to a cell or its progeny of the same cell type that has not been modified to include a gRNA molecule.

[0084] In an aspect of the cell described herein, including in any of the aforementioned cell aspects and embodiments, the cell is capable of differentiating into a differentiated cell, e.g., a cell of an erythroid lineage (e.g., a red blood cell), and wherein said differentiated cell exhibits an increased level of fetal hemoglobin, e.g., relative to a cell of the same type that has not been modified to include a gRNA molecule.

[0085] In an aspect of the cell described herein, including in any of the aforementioned cell aspects and embodiments, the differentiated cell (e.g., cell of an erythroid lineage, e.g., red blood cell) produces at least about 6 picograms (e.g., at least about 7 picograms, at least about 8 picograms, at least about 9 picograms, at least about 10 picograms, or from about 8 to about 9 picograms, or from about 9 to about 10 picograms) fetal hemoglobin, e.g., relative to a differentiated cell of the same type that has not been modified to include a gRNA molecule.

[0086] In an aspect of the cell described herein, including in any of the aforementioned cell aspects and embodiments, the cell has been contacted, e.g., contacted ex vivo, with a stem cell expander, for example, a stem cell expander selected from: a) (1r,4r)-N¹-(2-benzyl-7-(2-methyl-2H-tetrazol-5-yl)-9H-pyrimido[4,5-b]indol-4-yl)cyclohexane-1,4-diamine; b) methyl 4-(3-piperidin-1-ylpropylamino)-9H-pyrimido[4,5-b]indole-7-carboxylate; c) 4-(2-(2-(benzo[b]thiophen-3-yl)-9-isopropyl-9H-purin-6-ylamino)ethyl)phenol; d) (S)-2-(6-(2-(1H-indol-3-yl)ethylamino)-2-(5-fluoropyridin-3-yl)-9H-purin-9-yl)propan-1-ol; or e) combinations thereof (e.g., a combination of (1r,4r)-N¹-(2-benzyl-7-(2-methyl-2H-tetrazol-5-yl)-9H-pyrimido[4,5-b]indol-4-yl)cyclohexane-1,4-diamine and (S)-2-(6-(2-(1H-indol-3-yl)ethylamino)-2-(5-fluoropyridin-3-yl)-9H-purin-9-yl)propan-1-ol). In embodiments, the stem cell expander is (S)-2-(6-(2-(1H-indol-3-yl)ethylamino)-2-(5-fluoropyridin-3-yl)-9H-purin-9-yl)propan-1-ol.

[0087] In an aspect of the cell described herein, including in any of the aforementioned cell aspects and embodiments, the cell includes: a) an indel at or near a genomic DNA sequence complementary to the targeting domain of a gRNA molecule described herein, e.g., of any of the aforementioned gRNA molecule aspects or embodiments; or b) a deletion including sequence, e.g., substantially all the sequence, complementary to the targeting domain of a gRNA molecule described herein, e.g., of any of the aforementioned gRNA molecule aspects or embodiments (e.g., at least 90% complementary to the gRNA targeting domain, e.g., fully complementary to the gRNA targeting domain) in the WIZ gene region. In an aspect, the indel is an insertion or deletion of less than about 40 nucleotides, e.g., less than 30 nucleotides, e.g., less than 20 nucleotides, e.g., less than 10 nucleotides, for example, the indel is a single nucleotide deletion.

[0088] In an aspect of the cell described herein, including in any of the aforementioned cell aspects and embodiments, the cell is an animal cell, for example, the cell is a mammalian, a primate, or a human cell. In an aspect, the cell is a hematopoietic stem or progenitor cell (HSPC) (e.g., a population of HSPCs), e.g., the cell is a CD34+ cell, e.g., the cell is a CD34+CD90+ cell. In embodiments, the cell (e.g. population of cells) has been isolated from bone marrow, mobilized peripheral blood, or umbilical cord blood. In embodiments, the cell is autologous with respect to a patient to be administered said cell. In embodiments, the cell the cell is allogeneic with respect to a patient to be administered said cell.

[0089] In an aspect, the invention provides a population of cells described herein, e.g., a population of cells that include a cell described herein, e.g., a cell of any of the aforementioned cell aspects and embodiments. In aspects, the invention provides a population of cells, wherein at least about 50%, e.g., at least about 60%, e.g., at least about 70%, e.g., at least about 80%, e.g., at least about 90% (e.g., at least about 95%, at least about 96%, at least about 97%, at least about 98%, or at least about 99%) of the cells of the population are a cell described herein, e.g., a cell of any of the aforementioned cell aspects and embodiments. In aspects, the population of cells (e.g., a cell of the population of cells) is capable of differentiating into a population of differentiated cells, e.g., a population of cells of an erythroid lineage (e.g., a population of red blood cells), and wherein said population of differentiated cells has an increased percentage of F cells (e.g., at least about 15%, at least about 17%, at least about 20%, at least about 25%, at least about 30%, or at least about 40% higher percentage of F cells) e.g., relative to a population of unmodified cells of the same type. In aspects, the F cells of the population of differentiated cells produce an average of at least about 6 picograms (e.g., at least about 7 picograms, at least about 8 picograms, at least about 9 picograms, at least about 10 picograms, or from about 8 to about 9 picograms, or from about 9 to about 10 picograms) fetal hemoglobin per cell.

[0090] In an aspect, including in any of the aforementioned population of cell aspects and embodiments, the invention provides population of cells, including: 1) at least 1e6 CD34+ cells/kg body weight of the patient to whom the cells are to be administered; 2) at least 2e6 CD34+ cells/kg body weight of the patient to whom the cells are to be administered; 3) at least 3e6 CD34+ cells/kg body weight of the patient to whom the cells are to be administered; 4) at least 4e6 CD34+ cells/kg body weight of the patient to whom the cells are to be administered; or 5) from 2e6 to 10e6 CD34+ cells/kg body weight of the patient to whom the cells are to be administered. In embodiments, at least about 40%, e.g., at least about 50%, (e.g., at least about 60%, at least about 70%, at least about 80%, or at least about 90%) of the cells of the population are CD34+ cells. In embodiments, at least about 5%, e.g., at least about 10%, e.g., at least about 15%, e.g., at least about 20%, e.g., at least about 30% of the cells of the population are CD34+CD90+ cells. In embodiments, the population of cells is derived from umbilical cord blood, peripheral blood (e.g., mobilized peripheral blood), or bone marrow, e.g., is derived from bone marrow. In embodiments, the population of cells includes, e.g., consists of, mammalian cells, e.g., human cells. In embodiments, the population of cells is autologous relative to a patient to which it is to be administered. In other embodiments, the population of cells is allogeneic relative to a patient to which it is to be administered.

[0091] In an aspect, the invention provides a composition including a cell described herein, e.g., a cell of any of the aforementioned cell aspects and embodiments, or a population of cells described herein, e.g., a population of cells of any of the aforementioned population of cell aspects and embodiments. In an aspect, the composition includes a pharmaceutically acceptable medium, e.g., a pharmaceutically acceptable medium suitable for cryopreservation.

[0092] In an aspect, the invention provides a method of treating a hemoglobinopathy, including administering to a patient a cell described herein, e.g., a cell of any of the aforementioned cell aspects and embodiments, a population of cells described herein, e.g., a population of cells of any of the aforementioned population of cell aspects and embodiments, or a composition described herein, e.g., a composition of any of the aforementioned composition aspects and embodiments.

[0093] In an aspect, the invention provides a method of increasing fetal hemoglobin expression in a mammal, including administering to a patient a cell described herein, e.g., a cell of any of the aforementioned cell aspects and embodiments, a population of cells described herein, e.g., a population of cells of any of the aforementioned population of cell aspects and embodiments, or a composition described herein, e.g., a composition of any of the aforementioned composition aspects and embodiments. In aspects, the hemoglobinopathy is beta-thalassemia. In aspects, the hemoglobinopathy is sickle cell disease.

[0094] In an aspect, the invention provides a method of preparing a cell (e.g., a population of cells) including:
[0095] (a) providing a cell (e.g., a population of cells) (e.g., a HSPC (e.g., a population of HSPCs));
[0096] (b) culturing said cell (e.g., said population of cells) ex vivo in a cell culture medium including a stem cell expander; and
[0097] (c) introducing into said cell a first gRNA molecule, e.g., described herein, e.g., a first gRNA molecule of any of the aforementioned gRNA molecule aspects and embodiments; a nucleic acid molecule encoding a first gRNA molecule; a composition described herein, e.g., a composition of any of the aforementioned composition aspects and embodiments; or a vector described herein, e.g., a vector of any of the aforementioned aspects and embodiments. In aspects of the method, after said introducing of step (c), said cell (e.g., population of cells) is capable of differentiating into a differentiated cell (e.g., population of differentiated cells), e.g., a cell of an erythroid lineage (e.g., population of cells of an erythroid lineage), e.g., a red blood cell (e.g., a population of red blood cells), and wherein said differentiated cell (e.g., population of differentiated cells) produces increased fetal hemoglobin, e.g., relative to the same cell which has not been subjected to step (c). In aspects of the method, the stem cell expander is: a) (1r,4r)-N1-(2-benzyl-7-(2-methyl-2H-tetrazol-5-yl)-9H-pyrimido[4,5-b]indol-4-yl)cyclohexane-1,4-diamine; b) methyl 4-(3-piperidin-1-ylpropylamino)-9H-pyrimido[4,5-b]indole-7-carboxylate; c) 4-(2-(2-(benzo[b]thiophen-3-yl)-9-isopropyl-9H-purin-6-ylamino)ethyl)phenol; d) (S)-2-(6-(2-(1H-indol-3-yl)ethylamino)-2-(5-fluoropyridin-3-yl)-9H-purin-9-yl)propan-1-ol; or e) combinations thereof (e.g., a combination of (1r,4r)-N1-(2-benzyl-7-(2-methyl-2H-tetrazol-5-yl)-9H-pyrimido[4,5-b]indol-4-yl)cyclohexane-1,4-diamine and (S)-2-(6-(2-(1H-indol-3-yl)ethylamino)-2-(5-fluoropyridin-3-yl)-9H-purin-9-yl)propan-1-ol). In embodiments, the stem cell expander is (S)-2-(6-(2-(1H-indol-3-yl)ethylamino)-2-(5-fluoropyridin-3-yl)-9H-purin-9-yl)propan-1-ol. In aspects, the cell culture medium includes thrombopoietin (Tpo), Flt3 ligand (Flt-3L), and human stem cell factor (SCF). In aspects, the cell culture medium further includes human interleukin-6 (IL-6). In aspects, the cell culture medium includes thrombopoietin (Tpo), Flt3 ligand (Flt-3L), and human stem cell factor (SCF) each at a concentration ranging from about 10 ng/mL to about 1000 ng/mL, for example, each at a concentration of about 50 ng/mL, for example, each at a concentration of 50 ng/mL. In aspects, the cell culture medium includes human interleukin-6 (IL-6) at a concentration ranging from about 10 ng/mL to about 1000 ng/mL, for example, at a concentration of about 50 ng/mL, for example, at a concentration of 50 ng/mL. In aspects, the cell culture medium includes a stem cell expander at a concentration ranging from about 1 nM to about 1 mM, for example, at a concentration ranging from about 1 uM to about 100 nM, for example, at a concentration ranging from about 500 nM to about 750 nM. In aspects, the cell culture medium includes a stem cell expander at a concentration of about 500 nM, e.g., at a concentration of 500 nM. In aspects, the cell culture medium includes a stem cell expander at a concentration of about 750 nM, e.g., at a concentration of 750 nM.

[0098] In aspects of the method of preparing a cell (e.g., a population of cells), the culturing of step (b) includes a period of culturing before the introducing of step (c), for example, the period of culturing before the introducing of step (c) is at least 12 hours, e.g., is for a period of about 1 day to about 12 days, e.g., is for a period of about 1 day to about 6 days, e.g., is for a period of about 1 day to about 3 days, e.g., is for a period of about 1 day to about 2 days, e.g., is for a period of about 2 days. In aspects of the method of preparing a cell (e.g., a population of cells), including in any of the aforementioned aspects and embodiments of the method, the culturing of step (b) includes a period of culturing after the introducing of step (c), for example, the period of culturing after the introducing of step (c) is at least 12 hours, e.g., is for a period of about 1 day to about 12 days, e.g., is for a period of about 1 day to about 6 days, e.g., is for a period of about 2 days to about 4 days, e.g., is for a period of about 2 days or is for a period of about 3 days or is for a period of about 4 days. In aspects of the method of preparing a cell (e.g., a population of cells), including in any of the aforementioned aspects and embodiments of the method, the population of cells is expanded at least 4-fold, e.g., at least 5-fold, e.g, at least 10-fold, e.g., relative to cells which are not cultured according to step (b).

[0099] In aspects of the method of preparing a cell (e.g., a population of cells), including in any of the aforementioned aspects and embodiments of the method, the introducing of step (c) includes an electroporation. In aspects, the electroporation includes 1 to 5 pulses, e.g., 1 pulse, and wherein each pulse is at a pulse voltage ranging from 700 volts to 2000 volts and has a pulse duration ranging from 10 ms to 100 ms. In aspects, the electroporation includes, e.g., consists of, 1 pulse. In aspects, the pulse (or more than one pulse) voltage ranges from 1500 to 1900 volts, e.g., is 1700 volts. In aspects, the pulse duration of the one pulse or more than one pulse ranges from 10 ms to 40 ms, e.g., is 20 ms.

[0100] In aspects of the method of preparing a cell (e.g., a population of cells), including in any of the aforementioned aspects and embodiments of the method, the cell (e.g., population of cells) provided in step (a) is a human cell (e.g., a population of human cells). In aspects of the method of preparing a cell (e.g., a population of cells), including in any of the aforementioned aspects and embodiments of the method, the cell (e.g., population of cells) provided in step (a) is isolated from bone marrow, peripheral blood (e.g., mobilized peripheral blood) or umbilical cord blood. In aspects of the method of preparing a cell (e.g., a population of cells), including in any of the aforementioned aspects and embodiments of the method, the cell (e.g., population of cells) provided in step (a) is isolated from bone marrow, e.g., is isolated from bone marrow of a patient suffering from a hemoglobinopathy.

[0101] In aspects of the method of preparing a cell (e.g., a population of cells), including in any of the aforementioned aspects and embodiments of the method, the population of cells provided in step (a) is enriched for CD34+ cells.

[0102] In aspects of the method of preparing a cell (e.g., a population of cells), including in any of the aforementioned aspects and embodiments of the method, subsequent to the introducing of step (c), the cell (e.g., population of cells) is cryopreserved.

[0103] In aspects of the method of preparing a cell (e.g., a population of cells), including in any of the aforementioned aspects and embodiments of the method, subsequent to the introducing of step (c), the cell (e.g., population of cells) includes: a) an indel at or near a genomic DNA sequence complementary to the targeting domain of the first gRNA molecule; or b) a deletion including sequence, e.g., substantially all the sequence, complementary to the targeting domain of the first gRNA molecule (e.g., at least 90% complementary to the gRNA targeting domain, e.g., fully complementary to the gRNA targeting domain) in the WIZ gene region.

[0104] In aspects of the method of preparing a cell (e.g., a population of cells), including in any of the aforementioned aspects and embodiments of the method, after the introducing of step (c), at least about 40%, at least about 50%, at least about 60%, at least about 70%, at least about 80%, at least about 90%, at least about 95%, at least about 96%, at least about 97%, at least about 98% or at least about 99% of the cells of the population of cells include an indel at or near a genomic DNA sequence complementary to the targeting domain of the first gRNA molecule.

[0105] In an aspect, the invention provides a cell (e.g., population of cells), obtainable by a method of preparing a cell (e.g., a population of cells) described herein, e.g., described in any of the aforementioned method of preparing a cell aspects and embodiments.

[0106] In an aspect, the invention provides a method of treating a hemoglobinopathy in a human patient, including administering to a human patient a composition including a cell described herein, e.g., a cell of any of the aforementioned cell aspects and embodiments; or a population of cells described herein, e.g., a population of cells of any of the aforementioned population of cell aspects and embodiments. In aspects, the hemoglobinopathy is beta-thalassemia. In aspects, the hemoglobinopathy is sickle cell disease.

[0107] In an aspect, the invention provides a method of increasing fetal hemoglobin expression in a human patient, including administering to said human patient a composition including a cell described herein, e.g., a cell of any of the aforementioned cell aspects and embodiments; or a population of cells described herein, e.g., a population of cells of any of the aforementioned population of cell aspects and embodiments. In aspects, the human patients has beta-thalassemia. In aspects, the human patient has sickle cell disease.

[0108] In aspects of the method of treating a hemoglobinopathy or the method of increasing fetal hemoglobin expression, the human patient is administered a composition including at least about 1e6 cells (e.g., cells as described herein) per kg body weight of the human patient, e.g., at least about 1e6 CD34+ cells (e.g., cells as described herein) per kg body weight of the human patient. In aspects of the method of treating a hemoglobinopathy or the method of increasing fetal hemoglobin expression, the human patient is administered a composition including at least about 2e6 cells (e.g., cells as described herein) per kg body weight of the human patient, e.g., at least about 2e6 CD34+ cells (e.g., cells as described herein) per kg body weight of the human patient. In aspects of the method of treating a hemoglobinopathy or the method of increasing fetal hemoglobin expression, the human patient is administered a composition including about 2e6 cells (e.g., cells as described herein) per kg body weight of the human patient, e.g., about 2e6 CD34+ cells (e.g., cells as described herein) per kg body weight of the human patient. In aspects of the method of treating a hemoglobinopathy or the method of increasing fetal hemoglobin expression, the human patient is administered a composition including at least about 3e6 cells (e.g., cells as described herein) per kg body weight of the human patient, e.g., at least about 3e6 CD34+ cells (e.g., cells as described herein) per kg body weight of the human patient. In aspects of the method of treating a hemoglobinopathy or the method of increasing fetal hemoglobin expression, the human patient is administered a composition including about 3e6 cells (e.g., cells as described herein) per kg body weight of the human patient, e.g., about 3e6 CD34+ cells (e.g., cells as described herein) per kg body weight of the human patient. In aspects of the method of treating a hemoglobinopathy or the method of increasing fetal hemoglobin expression, the human patient is administered a composition including from about 2e6 to about 10e6 cells (e.g., cells as described herein) per kg body weight of the human patient, e.g., from about 2e6 to about 10e6 CD34+ cells (e.g., cells as described herein) per kg body weight of the human patient.

[0109] Also provided herein are methods for treating a hemoglobinopathy and by administering to a patient a cell or population of cells or a compositioin containing such cell or population of cells described herein, or a composition that reduces WIZ gene expression and/or WIZ protein activiy. In aspects, the composition that reduces WIZ gene expression and/or WIZ protein activiy comprises a small molecule compound (e.g., a WIZ degrader), siRNA, shRNA, antisense oligonucleotide (ASO), miRNA, anti-microRNA oligonucleotide (AMO) or any combination thereof. In aspects, the hemoglobinopathy is beta-thalassemia or sickle cell disease.

[0110] Also provided herein are methods for increasing fetal hemoglobin expression in a mammal by administering to a patient a cell or population of cells or a compositioin containing such cell or population of cells described herein, or a composition that reduces WIZ gene expression and/or WIZ protein activiy. In aspects, the composition that reduces WIZ gene expression and/or WIZ protein activiy comprises a small molecule compound (e.g., a WIZ degrader), siRNA, shRNA, antisense oligonucleotide (ASO), miRNA, anti-microRNA oligonucleotide (AMO) or any combination thereof.

[0111] In an aspect, the invention provides: a gRNA molecule described herein, e.g., a gRNA molecule of any of the aforementioned gRNA molecule aspects and embodiments; a composition described herein, e.g., a composition of any of the aforementioned composition aspects and embodiments, a nucleic acid described herein, e.g., a nucleic acid of any of the aforementioned nucleic acid aspects and embodiments; a vector described herein, e.g., a vector of any of the aforementioned vector aspects and embodiments; a cell described herein, e.g., a cell of any of the aforementioned cell aspects and embodiments; or a population of cells described herein, e.g., a population of cells of any of the aforementioned population of cells aspects and embodiments, or a composition that reduces WIZ gene expression and/or WIZ protein activiy aspects and embodiments, for use as a medicament. In aspects, the composition that reduces WIZ gene expression and/or WIZ protein activiy comprises a small molecule compound (e.g., a WIZ degrader), siRNA, shRNA, antisense oligonucleotide (ASO), miRNA, anti-microRNA oligonucleotide (AMO) or any combination thereof.

[0112] In an aspect, the invention provides: a gRNA molecule described herein, e.g., a gRNA molecule of any of the aforementioned gRNA molecule aspects and embodiments; a composition described herein, e.g., a composition of any of the aforementioned composition aspects and embodiments, a nucleic acid described herein, e.g., a nucleic acid of any of the aforementioned nucleic acid aspects and embodiments; a vector described herein, e.g., a vector of any of the aforementioned vector aspects and embodiments; a cell described herein, e.g., a cell of any of the aforementioned cell aspects and embodiments; or a population of cells described herein, e.g., a population of cells of any of the aforementioned population of cells aspects and embodiments, or a composition that reduces WIZ gene expression and/or WIZ protein activiy aspects and embodiments, for use in the manufacture of a medicament. In aspects, the composition that reduces WIZ gene expression and/or WIZ protein activiy comprises a small molecule compound (e.g., a WIZ degrader), siRNA, shRNA, antisense oligonucleotide (ASO), miRNA, anti-microRNA oligonucleotide (AMO) or any combination thereof.

[0113] In an aspect, the invention provides: a gRNA molecule described herein, e.g., a gRNA molecule of any of the aforementioned gRNA molecule aspects and embodiments; a composition described herein, e.g., a composition of any of the aforementioned composition aspects and embodiments, a nucleic acid described herein, e.g., a nucleic acid of any of the aforementioned nucleic acid aspects and embodiments; a vector described herein, e.g., a vector of any of the aforementioned vector aspects and embodiments; a cell described herein, e.g., a cell of any of the aforementioned cell aspects and embodiments; or a population of cells described herein, e.g., a population of cells of any of the aforementioned population of cells aspects and embodiments, or a composition that reduces WIZ gene expression and/or WIZ protein activiy aspects and embodiments, for use in the treatment of a disease. In aspects, the composition that reduces WIZ gene expression and/or WIZ protein activiy comprises a small molecule compound (e.g., a WIZ degrader), siRNA, shRNA, antisense oligonucleotide (ASO), miRNA, anti-microRNA oligonucleotide (AMO) or any combination thereof.

[0114] In an aspect, the invention provides: a gRNA molecule described herein, e.g., a gRNA molecule of any of the aforementioned gRNA molecule aspects and embodiments; a composition described herein, e.g., a composition of any of the aforementioned composition aspects and embodiments, a nucleic acid described herein, e.g., a nucleic acid of any of the aforementioned nucleic acid aspects and embodiments; a vector described herein, e.g., a vector of any of the aforementioned vector aspects and embodiments; a cell described herein, e.g., a cell of any of the aforementioned cell aspects and embodiments; or a population of cells described herein, e.g., a population of cells of any of the aforementioned population of cells aspects and embodiments, or a composition that reduces WIZ gene expression and/or WIZ protein activiy aspects and embodiments, for use in the treatment of a disease, wherein the disease is a hemoglobinopathy, for example, beta-thalassemia or sickle cell disease. In aspects, the composition that reduces WIZ gene expression and/or WIZ protein activiy comprises a small molecule compound (e.g., a WIZ degrader), siRNA, shRNA, antisense oligonucleotide (ASO), miRNA, anti-microRNA oligonucleotide (AMO) or any combination thereof.

### BRIEF DESCRIPTION OF THE DRAWINGS

[0115] FIG. 1A Volcano plot of differentially expressed genes from WIZ KO cells as compared to a scrambled gRNA control. Each dot represents a gene. HBG1/2 genes are differentially upregulated with WIZ_6 and WIZ_18 gRNA targeting WIZ gene.

[0116] FIG. 1B Frequency of HbF+ cells due to shRNA- mediated loss of WIZ in human mobilized peripheral blood CD34+ derived erythroid cells.

[0117] FIG. 1C Frequency of HbF+ cells due to CRISPR/Cas9-mediated loss of WIZ in human mobilized peripheral blood CD34+ derived erythroid cells.

ABBREVIATIONS

| | |
|---|---|
| ACN | acetonitrile |
| AcOH | acetic acid |
| AMO | anti-microRNA oligonucleotide |
| aq. | Aqueous |
| ASO | antisense oligonucleotide |
| Boc20 | di-tert-butyl dicarbonate |
| br | broad |
| BSA | bovine serum albumin |
| Cas9 | CRISPR associated protein 9 |
| CRISPR | Clustered regularly interspaced short palindromic repeats |
| crRNA | CRISPR RNA |
| d | doublet |
| DCE | 1,2-dichloroethane |
| DCM | dichloromethane |
| dd | doublet of doublets |
| ddd | doublet of doublet of doublets |
| ddq | doublet of doublet of quartets |
| ddt | doublet of doublet of triplets |
| DIPEA | N,N-diisopropylethylamine |
| DIPEA | (DIEA) diisopropylethylamine |
| DMA | N,N-dimethylacetamide |
| DMAP | 4-dimethylaminopyridine |
| DME | 1,2-dimethoxyethane |
| DMEM | Dulbecco’s modified eagle media |
| DMF | N,N-dimethylformamide |
| DMSO | dimethylsulfoxide |
| DMSO | Dimethyl sulfoxide |
| dq | doublet of quartets |
| dt | doublet of triplets |
| dtbbpy | 4,4′-di-tert-butyl-2,2′-dipyridyl |
| dtd | doublet of triplet of doublets |
| DTT | Dithiothreitol |
| EC50 | half maximal effective concentration |
| EDTA | ethylenediaminetetraacetic acid |
| eGFP | enhanced green fluorescent protein |
| ELSD | evaporative light scattering detector |
| Et20 | diethyl ether |
| Et3N | triethylamine |
| EtOAc | ethyl acetate |
| EtOH | ethanol |
| FACS | fluorescence-activated cell sorting |
| FBS | fetal bovine serum |
| FITC | fluorescein |
| Flt3L | Fms-related tyrosine kinase 3 ligand, Flt3L |
| g | gram |
| g/min | gram per minute |
| h or hr | hour |
| HbF | Fetal hemoglobin |
| HCl | hydrogen chloride |
| HEPES | (4-(2-hydroxyethyl)-1-piperazineethanesulfonic acid) |
| hept | heptet |
| HPLC | high performance liquid chromatography |
| HRMS | high resolution mass spectrometry |
| IC50 | half maximal inhibitory concentration |
| IMDM | Iscove’s modified Dulbecco’s medium |
| IPA (iPrOH) | isopropyl alcohol |
| Ir[(dF(CF₃)ppy)₂dtbbpy]PF₆ | [4,4′-Bis(1,1-dimethylethyl)-2,2′-bipyridine-N1,N1′]bis[3,5-difluoro-2-[5-(trifluoromethyl)-2-pyridinyl-N]phenyl-C]Iridium(III) hexafluorophosphate |
| KCl | potassium chloride |
| LCMS | liquid chromatography mass spectrometry |
| m | multiplet |
| M | molar |
| MeCN | acetonitrile |
| MeOH | methanol |
| mg | milligram |
| MHz | megahertz |
| min | minutes |
| mL | milliliter |
| mmol | millimole |
| mPB | mobilized peripheral blood |
| MS | mass spectrometry |
| MsCl | Methanesulfonyl chloride (CH₃SO₂Cl) |
| MsOH | methanesulphonic acid (CH₃SO₃H) |
| Na₂SO₄ | sodium sulfate |
| NaBH(OAc)₃ | sodium triacetoxyborohydride |
| NaHCO₃ | sodium bicarbonate |
| NMR | nuclear magnetic resonance |
| on | overnight |
| PBS | phosphate buffered saline |
| PdCl₂(dppf)•DCM | [1,1′-bis(diphenylphosphino)ferrocene]dichloropalladium(II) complex with dichloromethane |
| q | quartet |
| qd | quartet of doublets |
| quint | quintet |
| quintd | quintet of doublets |
| rbf | round bottom flask |
| rhEPO | recombinant human erythropoietin |
| rhIL-3 | recombinant human interleukin-3 |
| rhIL-6 | recombinant human interleukin-6 |
| rhSCF | recombinant human stem cell factor |
| rhTPO | recominant human thrombopoietin |
| RNP | ribonucleoprotein |
| Rt | retention time |
| rt or r.t. | room temperature |
| s | singlet |
| SEM | 2-(trimethylsilyl)ethoxymethyl |
| shRNA | short hairpin RNA |
| t | triplet |
| td | triplet of doublets |
| tdd | triplet of doublet of doublets |
| TEA (NEt₃) | triethylamine |
| TFA | trifluoroacetic acid |
| TfOH | triflic Acid |
| THF | tetrahydrofuran |
| TLC | thin-layer chromatography |
| TMP | 2,2,6,6-tetramethylpiperidine |
| tracrRNA | trans-activating crRNA |
| Ts | tosyl |
| tt | triplet of triplets |
| ttd | triplet of triplet of doublets |
| µW or uW | microwave |
| UPLC | ultra-Performance liquid Chromatography |
| WIZ | Widely-Interspaced Zinc Finger Containing Protein |

### DETAILED DESCRIPTION

### Definitions

[0118] The terms “CRISPR system,” “Cas system” or “CRISPR/Cas system” refer to a set of molecules comprising an RNA-guided nuclease or other effector molecule and a gRNA molecule that together are necessary and sufficient to direct and effect modification of nucleic acid at a target sequence by the RNA-guided nuclease or other effector molecule. In one embodiment, a CRISPR system comprises a gRNA and a Cas protein, e.g., a Cas9 protein. Such systems comprising a Cas9 or modified Cas9 molecule are referred to herein as “Cas9 systems” or “CRISPR/Cas9 systems.” In one example, the gRNA molecule and Cas molecule may be complexed, to form a ribonuclear protein (RNP) complex.

[0119] The terms “guide RNA,” “guide RNA molecule,” “gRNA molecule” or “gRNA” are used interchangeably, and refer to a set of nucleic acid molecules that promote the specific directing of a RNA-guided nuclease or other effector molecule (typically in complex with the gRNA molecule) to a target sequence. In some embodiments, said directing is accomplished through hybridization of a portion of the gRNA to DNA (e.g., through the gRNA targeting domain), and by binding of a portion of the gRNA molecule to the RNA-guided nuclease or other effector molecule (e.g., through at least the gRNA tracr). In embodiments, a gRNA molecule consists of a single contiguous polynucleotide molecule, referred to herein as a “single guide RNA” or “sgRNA” and the like. In other embodiments, a gRNA molecule consists of a plurality, usually two, polynucleotide molecules, which are themselves capable of association, usually through hybridization, referred to herein as a “dual guide RNA” or “dgRNA,” and the like. gRNA molecules are described in more detail below, but generally include a targeting domain and a tracr. In embodiments the targeting domain and tracr are disposed on a single polynucleotide. In other embodiments, the targeting domain and tracr are disposed on separate polynucleotides.

[0120] The term “targeting domain” as the term is used in connection with a gRNA, is the portion of the gRNA molecule that recognizes, e.g., is complementary to, a target sequence, e.g., a target sequence within the nucleic acid of a cell, e.g., within a gene.

[0121] The term “crRNA” as the term is used in connection with a gRNA molecule, is a portion of the gRNA molecule that comprises a targeting domain and a region that interacts with a tracr to form a flagpole region.

[0122] The term “target sequence” refers to a sequence of nucleic acids complimentary, for example fully complementary, to a gRNA targeting domain. In embodiments, the target sequence is disposed on genomic DNA. In an embodiment the target sequence is adjacent to (either on the same strand or on the complementary strand of DNA) a protospacer adjacent motif (PAM) sequence recognized by a protein having nuclease or other effector activity, e.g., a PAM sequence recognized by Cas9. In embodiments, the target sequence is a target sequence within a gene or locus that affects expression of a globin gene, e.g., that affects expression of beta globin or fetal hemoglobin (HbF). In embodiments, the target sequence is a target sequence within WIZ gene region.

[0123] The term “flagpole” as used herein in connection with a gRNA molecule, refers to the portion of the gRNA where the crRNA and the tracr bind to, or hybridize to, one another.

[0124] The term “tracr” as used herein in connection with a gRNA molecule, refers to the portion of the gRNA that binds to a nuclease or other effector molecule. In embodiements, the tracr comprises nucleic acid sequence that binds specifically to Cas9. In embodiments, the tracr comprises nucleic acid sequence that forms part of the flagpole.

[0125] The terms “Cas9” or “Cas9 molecule” refer to an enzyme from bacterial Type II CRISPR/Cas system responsible for DNA cleavage. Cas9 also includes wild-type protein as well as functional and nonfunctinal mutants thereof. In embodiments, the Cas9 is a Cas9 of S.pyogenes.

[0126] The term “complementary” as used in connection with nucleic acid, refers to the pairing of bases, A with T or U, and G with C. The term complementary refers to nucleic acid molecules that are completely complementary, that is, form A to T or U pairs and G to C pairs across the entire reference sequence, as well as molecules that are at least 80%, 85%, 90%, 95%, 99% complementary.

[0127] “Template Nucleic Acid” as used in connection with homology-directed repair or homologous recombination, refers to nucleic acid to be inserted at the site of modification by the CRISPR system donor sequence for gene repair (insertion) at site of cutting.

[0128] An “indel,” as the term is used herein, refers to a nucleic acid comprising one or more insertions of nucleotides, one or more deletions of nucleotides, or a combination of insertions and delections of nucleotides, relative to a reference nucleic acid, that results after being exposed to a composition comprising a gRNA molecule, for example a CRISPR system. Indels can be determined by sequencing nucleic acid after being exposed to a composition comprising a gRNA molecule, for example, by NGS. With respect to the site of an indel, an indel is said to be “at or near” a reference site (e.g., a site complementary to a targeting domain of a gRNA molecule) if it comprises at least one insertion or deletion within about 10, 9, 8, 7, 6, 5, 4, 3, 2, or 1 nucleotide(s) of the reference site, or is overlapping with part or all of said refrence site (e.g., comprises at least one insertion or deletion overlapping with, or within 10, 9, 8, 7, 6, 5, 4, 3, 2, or 1 nucelotides of a site complementary to the targeting domain of a gRNA molecule, e.g., a gRNA molecule described herein). In embodiments, the indel is a large deletion, for example, comprising more than about 1 kb, more than about 2 kb, more than about 3 kb, more than about 4 kb, more than about 5 kb, more than about 6 kb, or more than about 10 kb of nucleic acid. In embodiments, the 5′ end, the 3′ end, or both the 5′ and 3′ ends of the large deletion are disposed at or near a target sequence of a gRNA molecule described herein. In embodiments, the large deletion comprises about 4.9 kb of DNA disposed between a target sequence of a gRNA molecule, e.g., described herein, disposed within the WIZ gene region.

[0129] An “indel pattern,” as the term is used herein, refers to a set of indels that results after exposure to a composition comprising a gRNA molecule. In an embodiment, the indel pattern consists of the top three indels, by frequency of appearance. In an embodiment, the indel pattern consists of the top five indels, by frequency of appearance. In an embodiment, the indel pattern consists of the indels which are present at greater than about 1% frequency relative to all sequencing reads. In an embodiment, the indel pattern consists of the indels which are present at greater than about 5% frequency relative to all sequencing reads. In an embodiment, the indel pattern consists of the indels which are present at greater than about 10% frequency relative to to total number of indel sequencing reads (i.e., those reads that do not consist of the unmodified reference nucleic acid sequence). In an embodiment, the indel pattern includes of any 3 of the top five most frequently observed indels. The indel pattern may be determined, for example, by methods described herein, e.g., by sequencing cells of a population of cells which were exposed to the gRNA molecule.

[0130] An “off-target indel,” as the term is used herein, refers to an indel at or near a site other than the target sequence of the targeting domain of the gRNA molecule. Such sites may comprise, for example, 1, 2, 3, 4, 5 or more mismatch nucleotides relative to the sequence of the targeting domain of the gRNA. In exemplary embodiments, such sites are detected using targeted sequencing of in silico predicted off-target sites, or by an insertional method known in the art. With respect to the gRNAs described herein, examples of off-target indels are indels formed at sequences outside of the WIZ gene region. In exemplary embodiments the off-target indel is formed in a sequence of a gene, e.g., within a coding sequence of a gene.

[0131] The term “a” and “an” refers to one or to more than one (i.e., to at least one) of the grammatical object of the article. By way of example, “an element” means one element or more than one element.

[0132] The term “and/or” means either “and” or “or” unless indicated otherwise.

[0133] The term “about” when referring to a measurable value such as an amount, a temporal duration, and the like, is meant to encompass variations of ±20% or in some instances ±10%, or in some instances ±5%, or in some instances ±1%, or in some instances ±0.1% from the specified value, as such variations are appropriate to perform the disclosed methods.

[0134] The term “antigen” or “Ag” refers to a molecule that provokes an immune response. This immune response may involve either antibody production, or the activation of specific immunologically-competent cells, or both. The skilled artisan will understand that any macromolecule, including virtually all proteins or peptides, can serve as an antigen. Furthermore, antigens can be derived from recombinant or genomic DNA. A skilled artisan will understand that any DNA, which comprises a nucleotide sequences or a partial nucleotide sequence encoding a protein that elicits an immune response therefore encodes an “antigen” as that term is used herein. Furthermore, one skilled in the art will understand that an antigen need not be encoded solely by a full length nucleotide sequence of a gene. It is readily apparent that the present invention includes, but is not limited to, the use of partial nucleotide sequences of more than one gene and that these nucleotide sequences are arranged in various combinations to encode polypeptides that elicit the desired immune response. Moreover, a skilled artisan will understand that an antigen need not be encoded by a “gene” at all. It is readily apparent that an antigen can be synthesized or can be derived from a biological sample, or might be macromolecule besides a polypeptide. Such a biological sample can include, but is not limited to a tissue sample, a cell or a fluid with other biological components.

[0135] The term “autologous” refers to any material derived from the same individual into whom it is later to be re-introduced.

[0136] The term “allogeneic” refers to any material derived from a different animal of the same species as the individual to whom the material is introduced. Two or more individuals are said to be allogeneic to one another when the genes at one or more loci are not identical. In some aspects, allogeneic material from individuals of the same species may be sufficiently unlike genetically to interact antigenically.

[0137] The term “xenogeneic” refers to a graft derived from an animal of a different species.

[0138] “Derived from” as that term is used herein, indicates a relationship between a first and a second molecule. It generally refers to structural similarity between the first molecule and a second molecule and does not connotate or include a process or source limitation on a first molecule that is derived from a second molecule.

[0139] The term “encoding” refers to the inherent property of specific sequences of nucleotides in a polynucleotide, such as a gene, a cDNA, or an mRNA, to serve as templates for synthesis of other polymers and macromolecules in biological processes having either a defined sequence of nucleotides (e.g., rRNA, tRNA and mRNA) or a defined sequence of amino acids and the biological properties resulting therefrom. Thus, a gene, cDNA, or RNA, encodes a protein if transcription and translation of mRNA corresponding to that gene produces the protein in a cell or other biological system. Both the coding strand, the nucleotide sequence of which is identical to the mRNA sequence and is usually provided in sequence listings, and the non-coding strand, used as the template for transcription of a gene or cDNA, can be referred to as encoding the protein or other product of that gene or cDNA.

[0140] Unless otherwise specified, a “nucleotide sequence encoding an amino acid sequence” includes all nucleotide sequences that are degenerate versions of each other and that encode the same amino acid sequence. The phrase nucleotide sequence that encodes a protein or a RNA may also include introns to the extent that the nucleotide sequence encoding the protein may in some version contain an intron(s).

[0141] The terms “effective amount” and “therapeutically effective amount” are used interchangeably herein, and refer to an amount of a compound, formulation, material, or composition, as described herein effective to achieve a particular biological result, for example, reduction or inhibition of an enzyme or a protein activity, or ameliorate symptoms, alleviate conditions, slow or delay disease progression, or prevent a disease, etc. In one embodiment, the term “a therapeutically effective amount” refers to the amount of the compound of the disclosure that, when administered to a subject, is effective to (1) at least partially alleviate, prevent and/or ameliorate a condition, or a disorder or a disease (i) mediated by WIZ, or (ii) associated with WIZ activity, or (iii) characterized by activity (normal or abnormal) of WIZ: (2) reduce or inhibit the activity of WIZ; or (3) reduce or inhibit the expression level of WIZ gene and/or protein. In another embodiment, the term “a therapeutically effective amount” refers to the amount of the compound of the disclosure that, when administered to a cell, or a tissue, or a non-cellular biological material, or a medium, is effective to at least partially reducing or inhibiting the activity of WIZ; or at least partially reducing or inhibiting the expression level of WIZ gene and/or protein.

[0142] As used herein, the term “inhibit”, “inhibition” or “inhibiting” refers to the reduction or suppression of a given condition, symptom, or disorder, or disease, or a significant decrease in the baseline activity of a biological activity or process, or a decrease in the baseline expression level of a gene and/or a protein of interest.

[0143] The term “endogenous” refers to any material from or produced inside an organism, cell, tissue or system.

[0144] The term “exogenous” refers to any material introduced from or produced outside an organism, cell, tissue or system.

[0145] The term “expression” refers to the transcription and/or translation of a particular nucleotide sequence driven by a promoter.

[0146] The term “transfer vector” refers to a composition of matter which comprises an isolated nucleic acid and which can be used to deliver the isolated nucleic acid to the interior of a cell. Numerous vectors are known in the art including, but not limited to, linear polynucleotides, polynucleotides associated with ionic or amphiphilic compounds, plasmids, and viruses. Thus, the term “transfer vector” includes an autonomously replicating plasmid or a virus. The term should also be construed to further include nonplasmid and non-viral compounds which facilitate transfer of nucleic acid into cells, such as, for example, a polylysine compound, liposome, and the like. Examples of viral transfer vectors include, but are not limited to, adenoviral vectors, adeno-associated virus vectors, retroviral vectors, lentiviral vectors, and the like.

[0147] The term “expression vector” refers to a vector comprising a recombinant polynucleotide comprising expression control sequences operatively linked to a nucleotide sequence to be expressed. An expression vector comprises sufficient cis-acting elements for expression; other elements for expression can be supplied by the host cell or in an in vitro expression system. Expression vectors include all those known in the art, including cosmids, plasmids (e.g., naked or contained in liposomes) and viruses (e.g., lentiviruses, retroviruses, adenoviruses, and adeno-associated viruses) that incorporate the recombinant polynucleotide.

[0148] The term “homologous” or “identity” refers to the subunit sequence identity between two polymeric molecules, e.g., between two nucleic acid molecules, such as, two DNA molecules or two RNA molecules, or between two polypeptide molecules. When a subunit position in both of the two molecules is occupied by the same monomeric subunit; e.g., if a position in each of two DNA molecules is occupied by adenine, then they are homologous or identical at that position. The homology between two sequences is a direct function of the number of matching or homologous positions; e.g., if half (e.g., five positions in a polymer ten subunits in length) of the positions in two sequences are homologous, the two sequences are 50% homologous; if 90% of the positions (e.g., 9 of 10), are matched or homologous, the two sequences are 90% homologous.

[0149] The term “isolated” means altered or removed from the natural state. For example, a nucleic acid or a peptide naturally present in a living animal is not “isolated,” but the same nucleic acid or peptide partially or completely separated from the coexisting materials of its natural state is “isolated.” An isolated nucleic acid or protein can exist in substantially purified form, or can exist in a non-native environment such as, for example, a host cell.

[0150] The term “operably linked” or “transcriptional control” refers to functional linkage between a regulatory sequence and a heterologous nucleic acid sequence resulting in expression of the latter. For example, a first nucleic acid sequence is operably linked with a second nucleic acid sequence when the first nucleic acid sequence is placed in a functional relationship with the second nucleic acid sequence. For instance, a promoter is operably linked to a coding sequence if the promoter affects the transcription or expression of the coding sequence. Operably linked DNA sequences can be contiguous with each other and, e.g., where necessary to join two protein coding regions, are in the same reading frame.

[0151] The term “parenteral” administration of an immunogenic composition includes, e.g., subcutaneous (s.c.), intravenous (i.v.), intramuscular (i.m.), or intrasternal injection, intratumoral, or infusion techniques.

[0152] The term “nucleic acid” or “polynucleotide” refers to deoxyribonucleic acids (DNA) or ribonucleic acids (RNA) and polymers thereof in either single- or double-stranded form. Unless specifically limited, the term encompasses nucleic acids containing known analogues of natural nucleotides that have similar binding properties as the reference nucleic acid and are metabolized in a manner similar to naturally occurring nucleotides. Unless otherwise indicated, a particular nucleic acid sequence also implicitly encompasses conservatively modified variants thereof (e.g., degenerate codon substitutions), alleles, orthologs, SNPs, and complementary sequences as well as the sequence explicitly indicated. Specifically, degenerate codon substitutions may be achieved by generating sequences in which the third position of one or more selected (or all) codons is substituted with mixed-base and/or deoxyinosine residues (Batzer et al., Nucleic Acid Res. 19:5081 (1991); Ohtsuka et al., J. Biol. Chem. 260:2605-2608 (1985); and Rossolini et al., Mol. Cell. Probes 8:91-98 (1994)).

[0153] The terms “peptide,” “polypeptide,” and “protein” are used interchangeably, and refer to a compound comprised of amino acid residues covalently linked by peptide bonds. A protein or peptide must contain at least two amino acids, and no limitation is placed on the maximum number of amino acids that can comprise a protein’s or peptide’s sequence. Polypeptides include any peptide or protein comprising two or more amino acids joined to each other by peptide bonds. As used herein, the term refers to both short chains, which also commonly are referred to in the art as peptides, oligopeptides and oligomers, for example, and to longer chains, which generally are referred to in the art as proteins, of which there are many types. “Polypeptides” include, for example, biologically active fragments, substantially homologous polypeptides, oligopeptides, homodimers, heterodimers, variants of polypeptides, modified polypeptides, derivatives, analogs, fusion proteins, among others. A polypeptide includes a natural peptide, a recombinant peptide, or a combination thereof.

[0154] The term “promoter” refers to a DNA sequence recognized by the synthetic machinery of the cell, or introduced synthetic machinery, required to initiate the specific transcription of a polynucleotide sequence.

[0155] The term “promoter/regulatory sequence” refers to a nucleic acid sequence which is required for expression of a gene product operably linked to the promoter/regulatory sequence. In some instances, this sequence may be the core promoter sequence and in other instances, this sequence may also include an enhancer sequence and other regulatory elements which are required for expression of the gene product. The promoter/regulatory sequence may, for example, be one which expresses the gene product in a tissue specific manner.

[0156] The term “constitutive” promoter refers to a nucleotide sequence which, when operably linked with a polynucleotide which encodes or specifies a gene product, causes the gene product to be produced in a cell under most or all physiological conditions of the cell.

[0157] The term “inducible” promoter refers to a nucleotide sequence which, when operably linked with a polynucleotide which encodes or specifies a gene product, causes the gene product to be produced in a cell substantially only when an inducer which corresponds to the promoter is present in the cell.

[0158] The term “tissue-specific” promoter refers to a nucleotide sequence which, when operably linked with a polynucleotide encodes or specified by a gene, causes the gene product to be produced in a cell substantially only if the cell is a cell of the tissue type corresponding to the promoter.

[0159] As used herein “modulator” or “degrader”, means, for example, a compound of the disclosure, that effectively modulates, decreases, or reduces the levels of a specific protein (e.g., WIZ) or degrades a specific protein (e.g., WIZ). The amount of a specific protein (e.g., WIZ) degraded can be measured by comparing the amount of the specific protein (e.g., WIZ) remaining after treatment with a compound of the disclosure as compared to the initial amount or level of the specific protein (e.g., WIZ) present as measured prior to treatment with a compound of the disclosure.

[0160] As used herein “selective modulator”, “selective degrader”, or “selective compound” means, for example, a compound of the disclosure, that effectively modulates, decreases, or reduces the levels of a specific protein (e.g., WIZ) or degrades a specific protein (e.g., WIZ) to a greater extent than any other protein. A “selective modulator”, “selective degrader”, or “selective compound” can be identified, for example, by comparing the ability of a compound to modulate, decrease, or reduce the levels of or to degrade a specific protein (e.g., WIZ) to its ability to modulate, decrease, or reduce the levels of or to degrade other proteins. In some embodiments, the selectivity can be identified by measuring the EC₅₀ or IC₅₀ of the compounds. Degradation may be achieved through mediation of an E3 ligase, e.g., E3-ligase complexes comprising the protein Cereblon.

[0161] As used herein in connection with a messenger RNA (mRNA), a 5′ cap (also termed an RNA cap, an RNA 7-methylguanosine cap or an RNA m7G cap) is a modified guanine nucleotide that has been added to the “front” or 5′ end of a eukaryotic messenger RNA shortly after the start of transcription. The 5′ cap consists of a terminal group which is linked to the first transcribed nucleotide. Its presence is critical for recognition by the ribosome and protection from RNases. Cap addition is coupled to transcription, and occurs co-transcriptionally, such that each influences the other. Shortly after the start of transcription, the 5′ end of the mRNA being synthesized is bound by a cap-synthesizing complex associated with RNA polymerase. This enzymatic complex catalyzes the chemical reactions that are required for mRNA capping. Synthesis proceeds as a multi-step biochemical reaction. The capping moiety can be modified to modulate functionality of mRNA such as its stability or efficiency of translation.

[0162] As used herein, “in vitro transcribed RNA” or “IVT RNA” refers to RNA, preferably mRNA, that has been synthesized in vitro. Generally, the in vitro transcribed RNA is generated from an in vitro transcription vector. The in vitro transcription vector comprises a template that is used to generate the in vitro transcribed RNA.

[0163] As used herein, a “poly(A)” is a series of adenosines attached by polyadenylation to the mRNA. In the preferred embodiment of a construct for transient expression, the polyA is between 50 and 5000 (SEQ ID NO: 3118), preferably greater than 64, more preferably greater than 100, most preferably greater than 300 or 400. poly(A) sequences can be modified chemically or enzymatically to modulate mRNA functionality such as localization, stability or efficiency of translation.

[0164] As used herein, “polyadenylation” refers to the covalent linkage of a polyadenylyl moiety, or its modified variant, to a messenger RNA molecule. In eukaryotic organisms, most messenger RNA (mRNA) molecules are polyadenylated at the 3′ end. The 3′ poly(A) tail is a long sequence of adenine nucleotides (often several hundred) added to the pre-mRNA through the action of an enzyme, polyadenylate polymerase. In higher eukaryotes, the poly(A) tail is added onto transcripts that contain a specific sequence, the polyadenylation signal. The poly(A) tail and the protein bound to it aid in protecting mRNA from degradation by exonucleases. Polyadenylation is also important for transcription termination, export of the mRNA from the nucleus, and translation. Polyadenylation occurs in the nucleus immediately after transcription of DNA into RNA, but additionally can also occur later in the cytoplasm. After transcription has been terminated, the mRNA chain is cleaved through the action of an endonuclease complex associated with RNA polymerase. The cleavage site is usually characterized by the presence of the base sequence AAUAAA near the cleavage site. After the mRNA has been cleaved, adenosine residues are added to the free 3′ end at the cleavage site.

[0165] As used herein, “transient” refers to expression of a non-integrated transgene for a period of hours, days or weeks, wherein the period of time of expression is less than the period of time for expression of the gene if integrated into the genome or contained within a stable plasmid replicon in the host cell.

[0166] As used herein, the terms “treat”, “treatment” and “treating” refer to the reduction or amelioration of the progression, severity and/or duration of a disorder, e.g., a hemoglobinopathy, or the amelioration of one or more symptoms (preferably, one or more discernible symptoms) of a disorder, e.g., a hemoglobinopathy, resulting from the administration of one or more therapies (e.g., one or more therapeutic agents such as a gRNA molecule, CRISPR system, or modified cell of the invention). In specific embodiments, the terms “treat”, “treatment” and “treating” refer to the amelioration of at least one measurable physical parameter of a hemoglobinopathy disorder, not discernible by the patient. In other embodiments the terms “treat”, “treatment” and “treating” refer to the inhibition of the progression of a disorder, either physically by, e.g., stabilization of a discernible symptom, physiologically by, e.g., stabilization of a physical parameter, or both. In other embodiments the terms “treat”, “treatment” and “treating” refer to the reduction or stabilization of a symptom of a hemoglobinopathy, e.g., sickle cell disease or beta-thalassemia.

[0167] As used herein, the term “prevent”, “preventing” or “prevention” of any disease or disorder refers to the prophylactic treatment of the disease or disorder; or delaying the onset or progression of the disease or disorder.

[0168] As used herein, “HbF-dependent disease or disorder” means any disease or disorder which is directly or indirectly affected by the modulation of HbF protein levels. Preferable examples of such disease or disorders are hemoglobinopathyies, such as sickle cell disease or a thalassemia (e.g., beta-thalassemia).

[0169] As used herein, a subject is “in need of” a treatment if such subject would benefit biologically, medically or in quality of life from such treatment.

[0170] The term “signal transduction pathway” refers to the biochemical relationship between a variety of signal transduction molecules that play a role in the transmission of a signal from one portion of a cell to another portion of a cell. The phrase “cell surface receptor” includes molecules and complexes of molecules capable of receiving a signal and transmitting signal across the membrane of a cell.

[0171] The term “subject” is intended to include living organisms in which an immune response can be elicited (e.g., mammals, human). Preferably, the term “subject” refers to primates (e.g., humans, male or female), dogs, rabbits, guinea pigs, pigs, rats and mice. In certain embodiments, the subject is a primate. In yet other embodiments, the subject is a human.

[0172] The term, a “substantially purified” cell refers to a cell that is essentially free of other cell types. A substantially purified cell also refers to a cell which has been separated from other cell types with which it is normally associated in its naturally occurring state. In some instances, a population of substantially purified cells refers to a homogenous population of cells. In other instances, this term refers simply to cell that have been separated from the cells with which they are naturally associated in their natural state. In some aspects, the cells are cultured in vitro. In other aspects, the cells are not cultured in vitro.

[0173] The term “therapeutic” as used herein means a treatment. A therapeutic effect is obtained by reduction, suppression, remission, or eradication of a disease state.

[0174] The term “prophylaxis” as used herein means the prevention of or protective treatment for a disease or disease state.

[0175] The term “transfected” or “transformed” or “transduced” refers to a process by which exogenous nucleic acid and/or ptotein is transferred or introduced into the host cell. A “transfected” or “transformed” or “transduced” cell is one which has been transfected, transformed or transduced with exogenous nucleic acid and/or protein. The cell includes the primary subject cell and its progeny.

[0176] The term “specifically binds,” refers to a molecule recognizing and binding with a binding partner (e.g., a protein or nucleic acid) present in a sample, but which molecule does not substantially recognize or bind other molecules in the sample.

[0177] The term “bioequivalent” refers to an amount of an agent other than the reference compound, required to produce an effect equivalent to the effect produced by the reference dose or reference amount of the reference compound.

[0178] “Refractory” as used herein refers to a disease, e.g., a hemoglobinopathy, that does not respond to a treatment. In embodiments, a refractory hemoglobinopathy can be resistant to a treatment before or at the beginning of the treatment. In other embodiments, the refractory hemoglobinopathy can become resistant during a treatment. A refractory hemoglobinopathy is also called a resistant hemoglobinopathy.

[0179] “Relapsed” as used herein refers to the return of a disease (e.g., hemoglobinopathy) or the signs and symptoms of a disease such as a hemoglobinopathy after a period of improvement, e.g., after prior treatment of a therapy, e.g., hemoglobinopathy therapy.

[0180] Ranges: throughout this disclosure, various aspects of the invention can be presented in a range format. It should be understood that the description in range format is merely for convenience and brevity and should not be construed as an inflexible limitation on the scope of the invention. Accordingly, the description of a range should be considered to have specifically disclosed all the possible subranges as well as individual numerical values within that range. For example, description of a range such as from 1 to 6 should be considered to have specifically disclosed subranges such as from 1 to 3, from 1 to 4, from 1 to 5, from 2 to 4, from 2 to 6, from 3 to 6 etc., as well as individual numbers within that range, for example, 1, 2,2.7, 3, 4, 5, 5.3, and 6. As another example, a range such as 95-99% identity, includes something with 95%, 96%, 97%, 98% or 99% identity, and includes subranges such as 96-99%, 96-98%, 96-97%, 97-99%, 97-98% and 98-99% identity. This applies regardless of the breadth of the range.

[0181] The term “WIZ” refers to Widely-Interspaced Zinc Finger-Containing Protein or variants or homologs thereof that maintain its transcriptional activity (e.g. within at least 50%, 80%, 90%, 95%, 96%, 97%, 98%, 99% or 100% activity compared to WIZ), and the gene encoding said protein, together with all introns and exons as well as its regulatory regions such as promoters and enhancers. This gene encodes a zinc-finger protein. WIZ is also known as Zinc Finger Protein 803, ZNF803, Widely Interspaced Zinc Finger Motifs, WIZ Zinc Finger. The term encompasses all isoforms and splice variants of WIZ. The human gene encoding WIZ is mapped to chromosomal location Chromosome 19: 15,419,980-15,449,951 (by Ensembl). The human and murine amino acid and nucleic acid sequences can be found in a public database, such as GenBank, UniProt and Swiss-Prot., and the genomic sequence of human WIZ can be found in GenBank at NC_000019.10. The WIZ gene refers to this genomic location, including all introns and exons. There are multiple known isotypes of WIZ. In some embodiments, the variants or homologs have at least 90%, 95%, 96%, 97%, 98%, 99% or 100% amino acid sequence identity across the whole sequence or a portion of the sequence (e.g. a 50, 100, 150 or 200 continuous amino acid portion) compared to a naturally occurring WIZ protein. Exemplary WIZ transcript variants and their genomic coordinates are shown in Table 4.

TABLE 4

Genomic coordinates of WIZ transcripts variants

| Variant | region | chrom | start_bed | end | strand |
|---|---|---|---|---|---|
| NCBI_tv1_NM_021241.3 | exon_8 | chr19 | 15449797 | 15449956 | - |
| NCBI_tv1_NM_021241.3 | exon_7 | chr19 | 15448102 | 15448367 | - |
| NCBI_tv1_NM_021241.3 | exon_6 | chr19 | 15436805 | 15437129 | - |
| NCBI_tv1_NM_021241.3 | exon_5 | chr19 | 15426981 | 15427533 | - |
| NCBI_tv1_NM_021241.3 | exon_4 | chr19 | 15425240 | 15425768 | - |
| NCBI_tv1_NM_021241.3 | exon_3 | chr19 | 15424612 | 15425032 | - |
| NCBI_tv1_NM_021241.3 | exon_2 | chr19 | 15424182 | 15424378 | - |
| NCBI_tv1_NM_021241.3 | exon_1 | chr19 | 15419977 | 15423235 | - |
| NCBI_tv2_NM_001330395.2 | exon_8 | chr19 | 15432433 | 15432761 | - |
| NCBI_tv2_NM_001330395.2 | exon_7 | chr19 | 15431011 | 15431182 | - |
| NCBI_tv2_NM_001330395.2 | exon_6 | chr19 | 15429585 | 15430089 | - |
| NCBI_tv2_NM_001330395.2 | exon_5 | chr19 | 15426981 | 15427533 | - |
| NCBI_tv2_NM_001330395.2 | exon_4 | chr19 | 15425240 | 15425768 | - |
| NCBI_tv2_NM_001330395.2 | exon_3 | chr19 | 15424612 | 15425032 | - |
| NCBI_tv2_NM_001330395.2 | exon_2 | chr19 | 15424182 | 15424378 | - |
| NCBI_tv2_NM_001330395.2 | exon_1 | chr19 | 15419977 | 15423235 | - |
| NCBI_tv3_NM_001371589.1 | exon_13 | chr19 | 15449797 | 15449956 | - |
| NCBI_tv3_NM_001371589.1 | exon_12 | chr19 | 15448102 | 15448367 | - |
| NCBI_tv3_NM_001371589.1 | exon_11 | chr19 | 15442675 | 15442748 | - |
| NCBI_tv3_NM_001371589.1 | exon_10 | chr19 | 15438577 | 15440715 | - |
| NCBI_tv3_NM_001371589.1 | exon_9 | chr19 | 15436805 | 15437129 | - |
| NCBI_tv3_NM_001371589.1 | exon_8 | chr19 | 15431011 | 15431182 | - |
| NCBI_tv3_NM_001371589.1 | exon_7 | chr19 | 15429585 | 15430089 | - |
| NCBI_tv3_NM_001371589.1 | exon_6 | chr19 | 15428109 | 15428508 | - |
| NCBI_tv3_NM_001371589.1 | exon_5 | chr19 | 15426981 | 15427533 | - |
| NCBI_tv3_NM_001371589.1 | exon_4 | chr19 | 15425240 | 15425768 | - |
| NCBI_tv3_NM_001371589.1 | exon_3 | chr19 | 15424612 | 15425032 | - |
| NCBI_tv3_NM_001371589.1 | exon_2 | chr19 | 15424182 | 15424378 | - |
| NCBI_tv3_NM_001371589.1 | exon_1 | chr19 | 15419977 | 15423235 | - |
| NCBI_tv4_NM_001371603.1 | exon_9 | chr19 | 15432433 | 15432761 | - |
| NCBI_tv4_NM_001371603.1 | exon_8 | chr19 | 15431011 | 15431182 | - |
| NCBI_tv4_NM_001371603.1 | exon_7 | chr19 | 15429585 | 15430089 | - |
| NCBI_tv4_NM_001371603.1 | exon_6 | chr19 | 15428109 | 15428508 | - |
| NCBI_tv4_NM_001371603.1 | exon_5 | chr19 | 15426981 | 15427533 | - |
| NCBI_tv4_NM_001371603.1 | exon_4 | chr19 | 15425240 | 15425768 | - |
| NCBI_tv4_NM_001371603.1 | exon_3 | chr19 | 15424612 | 15425032 | - |
| NCBI_tv4_NM_001371603.1 | exon_2 | chr19 | 15424182 | 15424378 | - |
| NCBI_tv4_NM_001371603.1 | exon_1 | chr19 | 15419977 | 15423235 | - |
| WIZ_201_(Ensembl) | exon_8 | chr19 | 15449797 | 15449951 | - |
| WIZ_201_(Ensembl) | exon_7 | chr19 | 15448102 | 15448367 | - |
| WIZ_201_(Ensembl) | exon_6 | chr19 | 15436805 | 15437129 | - |
| WIZ_201_(Ensembl) | exon_5 | chr19 | 15426981 | 15427533 | - |
| WIZ_201_(Ensembl) | exon_4 | chr19 | 15425240 | 15425768 | - |
| WIZ_201_(Ensembl) | exon_3 | chr19 | 15424612 | 15425032 | - |
| WIZ_201_(Ensembl) | exon_2 | chr19 | 15424182 | 15424378 | - |
| WIZ_201_(Ensembl) | exon_1 | chr19 | 15419979 | 15423235 | - |
| WIZ_202_(Ensembl) | exon_7 | chr19 | 15431011 | 15431150 | - |
| WIZ_202_(Ensembl) | exon_6 | chr19 | 15429585 | 15430089 | - |
| WIZ_202_(Ensembl) | exon_5 | chr19 | 15426981 | 15427533 | - |
| WIZ_202_(Ensembl) | exon_4 | chr19 | 15425240 | 15425768 | - |
| WIZ_202_(Ensembl) | exon_3 | chr19 | 15424612 | 15425032 | - |
| WIZ_202_(Ensembl) | exon_2 | chr19 | 15424182 | 15424378 | - |
| WIZ_202_(Ensembl) | exon_1 | chr19 | 15421507 | 15423235 | - |
| WIZ_203_(Ensembl) | exon_8 | chr19 | 15431011 | 15431150 | - |
| WIZ_203_(Ensembl) | exon_7 | chr19 | 15429585 | 15430089 | - |
| WIZ_203_(Ensembl) | exon_6 | chr19 | 15428109 | 15428508 | - |
| WIZ_203_(Ensembl) | exon_5 | chr19 | 15426981 | 15427533 | - |
| WIZ_203_(Ensembl) | exon_4 | chr19 | 15425240 | 15425768 | - |
| WIZ_203_(Ensembl) | exon_3 | chr19 | 15424612 | 15425032 | - |
| WIZ_203_(Ensembl) | exon_2 | chr19 | 15424182 | 15424378 | - |
| WIZ_203_(Ensembl) | exon_1 | chr19 | 15421507 | 15423235 | - |
| WIZ_205_(Ensembl) | exon_3 | chr19 | 15449466 | 15449608 | - |
| WIZ_205_(Ensembl) | exon_2 | chr19 | 15448102 | 15448367 | - |
| WIZ_205_(Ensembl) | exon_1 | chr19 | 15436933 | 15437129 | - |
| WIZ_206_(Ensembl) | exon_8 | chr19 | 15432433 | 15432557 | - |
| WIZ_206_(Ensembl) | exon_7 | chr19 | 15431011 | 15431182 | - |
| WIZ_206_(Ensembl) | exon_6 | chr19 | 15429585 | 15430089 | - |
| WIZ_206_(Ensembl) | exon_5 | chr19 | 15426981 | 15427533 | - |
| WIZ_206_(Ensembl) | exon_4 | chr19 | 15425240 | 15425768 | - |
| WIZ_206_(Ensembl) | exon_3 | chr19 | 15424612 | 15425032 | - |
| WIZ_206_(Ensembl) | exon_2 | chr19 | 15424182 | 15424378 | - |
| WIZ_206_(Ensembl) | exon_1 | chr19 | 15422086 | 15423235 | - |
| WIZ_207_(Ensembl) | exon_9 | chr19 | 15433164 | 15433290 | - |
| WIZ_207_(Ensembl) | exon_8 | chr19 | 15431011 | 15431182 | - |
| WIZ_207_(Ensembl) | exon_7 | chr19 | 15429585 | 15430089 | - |
| WIZ_207_(Ensembl) | exon_6 | chr19 | 15428109 | 15428508 | - |
| WIZ_207_(Ensembl) | exon_5 | chr19 | 15426981 | 15427533 | - |
| WIZ_207_(Ensembl) | exon_4 | chr19 | 15425240 | 15425768 | - |
| WIZ_207_(Ensembl) | exon_3 | chr19 | 15424612 | 15425032 | - |
| WIZ_207_(Ensembl) | exon_2 | chr19 | 15424182 | 15424378 | - |
| WIZ_207_(Ensembl) | exon_1 | chr19 | 15421522 | 15423235 | - |
| WIZ_209_(Ensembl) | exon_11 | chr19 | 15449797 | 15449951 | - |
| WIZ_209_(Ensembl) | exon_10 | chr19 | 15448102 | 15448367 | - |
| WIZ_209_(Ensembl) | exon_9 | chr19 | 15442675 | 15442748 | - |
| WIZ_209_(Ensembl) | exon_8 | chr19 | 15438577 | 15440715 | - |
| WIZ_209_(Ensembl) | exon_7 | chr19 | 15436805 | 15437129 | - |
| WIZ_209_(Ensembl) | exon_6 | chr19 | 15429585 | 15430089 | - |
| WIZ_209_(Ensembl) | exon_5 | chr19 | 15426981 | 15427533 | - |
| WIZ_209_(Ensembl) | exon_4 | chr19 | 15425240 | 15425768 | - |
| WIZ_209_(Ensembl) | exon_3 | chr19 | 15424612 | 15425032 | - |
| WIZ_209_(Ensembl) | exon_2 | chr19 | 15424182 | 15424378 | - |
| WIZ_209_(Ensembl) | exon_1 | chr19 | 15422090 | 15423235 | - |

[0182] In embodiments, exemplary WIZ transcript variants and their nucleotide sequences are shown below in Table 5.

TABLE 5

WIZ transcript variants compositions

| name_of_WIZ_transcript _variant | transcript_variant_composition | seq_name | SEQ ID NO |
|---|---|---|---|
| NCBI_tv1: NM_021241.3 | exon_01_nc; exon_03_nc; exon_03_c; exon_06 c.1; exon_06_c.2; exon_12_c; exon_13_c; exon_14_c; exon_15_c; exon_16_c; exon_16_nc.1; exon_16_nc.2; exon_16_nc.3; exon_16_nc.4; exon_16_nc.5 | NCBI_RefSeq_NM_021241.3_transcript_variant_1_mRNA | 3185 |
| NCBI_tv2: NM_001330395.2 | exon_08_nc.1; exon_08_nc.2; exon_09_nc; exon_09_c.2; exon_09_c.3; exon_10_c; exon_12_c; exon_13_c; exon_14_c; exon_15_c; exon_16_c; exon_16_nc.1; exon_16_nc.2; exon_16_nc.3; exon_16_nc.4; exon_16_nc.5 | NCBI_RefSeq_NM_001330395.2_transcript_variant_2_mRNA | 3186 |
| NCBI_tv3: NM_001371589.1 | exon_01_nc; exon_03_c; exon_04_c; exon_05_c; exon_06_c.1; exon_06_c.2; exon_09_c.1; exon_09_c.2; exon_09_c.3; exon_10_c; exon_11_c; exon_12_c; exon_13_c; exon_14_c; exon_15_c; exon_16_c; exon_16_nc.1; exon_16_nc.2; exon_16_nc.3; exon_16_nc.4; exon_16_nc.5 | NCBI_RefSeq_NM_001371589.1_transcript_variant_3_mRNA | 3187 |
| NCBI_tv4: NM_001371603.1 | exon_08_nc.1; exon_08_nc.2; exon_09_nc; exon_09_c.2; exon_09_c.3; exon_10_c; exon_11_c; exon_12_c; exon_13_c; exon_14_c; exon_15_c; exon_16_c; exon_16_nc.1; exon_16_nc.2; exon_16_nc.3; exon_16_nc.4; exon_16_nc.5 | NCBI_RefSeq_NM_001371603.1_transcript_variant_4_mRNA | 3188 |
| WIZ_201_(Ensembl) | exon_01_nc; exon_03_nc; exon_03_c; exon_06 c.1; exon_06_c.2; exon_12_c; exon_13_c; exon_14_c; exon_15_c; exon_16_c; exon_16_nc.1; exon_16_nc.2; exon_16_nc.3; exon_16_nc.4; exon_16_nc.5 | Ensembl_ENST00000263381.11_WIZ-201_cdna_protein_coding | 3189 |
| WIZ_202 (Ensembl) | exon_09_c.3; exon_10_c; exon_12_c; exon_13_c; exon_14_c; exon_15_c; exon_16_c; exon_16_nc.1; exon_16_nc.2; exon_16_nc.3; exon_16_nc.4 | Ensembl_ENST00000389282.8_WIZ-202_cdna_protein_coding | 3190 |
| WIZ_203 (Ensembl) | exon_09_c.3; exon_10_c; exon_11_c; exon_12_c; exon_13_c; exon_14_c; exon_15_c; exon_16_c; exon_16_nc.1; exon_16_nc.2; exon_16_nc.3; exon_16_nc.4; exon_16_nc.5 | Ensembl_ENST00000545156.5_WIZ-203_cdna_protein_coding | 3191 |
| WIZ_205 (Ensembl) | exon_02_nc; exon_03_nc; exon_03_c; exon_06_c.1 | Ensembl_ENST00000596159.1_WIZ-205_cdna_protein_coding | 3192 |
| WIZ_206 (Ensembl) | exon_07_nc; exon_08_nc.2; exon_09_nc; exon_09_c.2; exon_09_c.3; exon_10_c; exon_12_c; exon_13_c; exon_14_c; exon_15_c; exon_16_c; exon_16_nc.1; exon_16_nc.2 | Ensembl_ENST00000599686.3_WIZ-206_cdna_protein_coding | 3193 |
| WIZ_207 (Ensembl) | exon_07_nc; exon_09_nc; exon_09_c.2; exon_09_c.3; exon_10_c; exon_11_c; exon_12_c; exon_13_c; exon_14_c; exon_15_c; exon_16_c; exon_16_nc.1; exon_16_nc.2; exon_16_nc.3 | Ensembl_ENST00000599910.6_WIZ-207_cdna_protein_coding | 3194 |
| WIZ_209 (Ensembl) | exon_01_nc; exon_03_nc; exon_03_c; exon_04_c; exon_05_c; exon_06 c.1; exon_06_c.2; exon_10_c; exon_12_c; exon_13_c; exon_14_c; exon_15_c; exon_16_c; exon_16_nc.1 | Ensembl_ENST00000643092.1_WIZ-209_cdna_protein_coding | 3195 |

[0183] The peptide sequence of isoform 1 of human WIZ is:

MEGSLAGSLA APDRPQGPER LPGPAPRENI EGGAEAAEGE GGIFRSTRYL PVTKEGPRDI
LDGRGGISGT PDGRGPWEHP LVQEAGEGIL SERRFEDSVI VRTMKPHAEL EGSRRFLHHR
GEPRLLEKHA QGRPRFDWLQ DEDEQGSPQD AGLHLDLPAQ PPPLAPFRRV FVPVEDTPKT
LDMAVVGGRE DLEDLEGLAQ PSEWGLPTSA SEVATQTWTV NSEASVERLQ PLLPPIRTGP
YLCELLEEVA EGVASPDEDE DEEPAVFPCI ECSIYFKQKE HLLEHMSQHR RAPGQEPPAD
LAPLACGECG WAFADPTALE QHRQLHQASR EKIIEEIQKL KQVPGDEGRE ARLQCPKCVF
GTNSSRAYVQ HAKLHMREPP GQTTKEPFGG SSGAGSPSPE ASALLYQPYG AAVGLSACVF
CGFPAPSESL LREHVRLVHA HPHWEEDGEA YEEDPASQPG TSQDAHACFP DTAVDYFGKA
EPSLAPMWRE NPAGYDPSLA FGPGCQQLSI RDFPLSKPLL HGTGQRPLGR LAFPSTLAST
PYSLQLGRNK STVHPQGLGE RRRPWSEEEE EEEEEEDVVL TSEMDFSPEN GVFSPLATPS
LIPQAALELK QAFREALQAV EATQGQQQQL RGMVPIVLVA KLGPQVMAAA RVPPRLQPEE
LGLAGAHPLD FLLLDAPLGG PLGLDTLLDG DPAMALKHEE RKCPYCPDRF HNGIGLANHV
RGHLNRVGVS YNVRHFISAE EVKAIERRFS FQKKKKKVAN FDPGTFSLMR CDFCGAGFDT
RAGLSSHARA HLRDFGITNW ELTVSPINIL QELLATSAAE QPPSPLGREP GGPPGSFLTS
RRPRLPLTVP FPPTWAEDPG PAYGDAQSLT TCEVCGACFE TRKGLSSHAR SHLRQLGVAE
SESSGAPIDL LYELVKQKGL PDAHLGLPPG LAKKSSSLKE VVAGAPRPGL LSLAKPLDAP
AVNKAIKSPP GFSAKGLGHP PSSPLLKKTP LALAGSPTPK NPEDKSPQLS LSPRPASPKA
QWPQSEDEGP LNLTSGPEPA RDIRCEFCGE FFENRKGLSS HARSHLRQMG VTEWYVNGSP
IDTLREILKR RTQSRPGGPP NPPGPSPKAL AKMMGGAGPG SSLEARSPSD LHISPLAKKL
PPPPGSPLGH SPTASPPPTA RKMFPGLAAP SLPKKLKPEQ IRVEIKREML PGALHGELHP
SEGPWGAPRE DMTPLNLSSR AEPVRDIRCE FCGEFFENRK GLSSHARSHL RQMGVTEWSV
NGSPIDTLRE ILKKKSKPCL IKKEPPAGDL APALAEDGPP TVAPGPVQSP LPLSPLAGRP
GKPGAGPAQV PRELSLTPIT GAKPSATGYL GSVAAKRPLQ EDRLLPAEVK AKTYIQTELP
FKAKTLHEKT SHSSTEACCE LCGLYFENRK ALASHARAHL RQFGVTEWCV NGSPIETLSE
WIKHRPQKVG AYRSYIQGGR PFTKKFRSAG HGRDSDKRPS LGLAPGGLAV VGRSAGGEPG
PEAGRAADGG ERPLAASPPG TVKAEEHQRQ NINKFERRQA RPPDASAARG GEDTNDLQQK
LEEVRQPPPR VRPVPSLVPR PPQTSLVKFV GNIYTLKCRF CEVEFQGPLS IQEEWVRHLQ
RHILEMNFSK ADPPPEESQA PQAQTAAAEA P

SEQ ID NO: 3173 (UniProt Identifier: O95785-1).

[0184] The sequences of other WIZ protein isoforms are provided at:
[0185] Isoform 2: UniProt O95785-2
[0186] Isoform 3: UniProt O95785-3
[0187] Isoform 4: UniProt O95785-4.

[0188] Alternatively, isoforms of WIZ protein have the amino acid sequences of NCBI Reference Sequence NP_067064.2, NP_001317324.2, NP_001358518.1, NP_001358532.2, XP_005260064.1, XP_005260062.1, XP_005260063.1, XP_005260065.1, XP_005260068.1, XP_006722891.1, XP_005260067.1, XP_011526465.1, or XP_024307397.1.

[0189] As used herein, a human WIZ protein also encompasses proteins that have over its full length at least about 70%, 71%, 72%, 73%, 74%, 75%, 76%, 77%, 78%, 79%, 80%, 81%, 82%, 83%, 84%, 85%, 86%, 87%, 88%, 89%, 90%, 91%, 92%, 93%, 94%, 95%, 96%, 97%, 98%, 99% or 100% sequence identity with WIZ isoform disclosed herein, wherein such proteins still have at least one of the functions of WIZ.

[0190] The term “complementary” as used in connection with nucleic acid, refers to the pairing of bases, A with T or U, and G with C. The term complementary refers to nucleic acid molecules that are completely complementary, that is, form A to T or U pairs and G to C pairs across the entire reference sequence, as well as molecules that are at least 80%, 85%, 90%, 95%, 99% complementary.

[0191] The terms “hematopoietic stem and progenitor cell” or “HSPC” are used interchangeably, and refer to a population of cells comprising both hematopoietic stem cells (“HSCs”) and hematopoietic progenitor cells (“HPCs”). Such cells are characterized, for example, as CD34+. In exemplary embodiments, HSPCs are isolated from bone marrow. In other exemplary embodiments, HSPCs are isolated from peripheral blood. In other exemplary embodiments, HSPCs are isolated from umbilical cord blood. In an embodiment, HSPCs are characterized as CD34+/CD38-/CD90+/CD45RA-. In embodiments, the HSPCs are characterized as CD34+/CD90+/CD49f+ cells. In embodiments, the HSPCs are characterized as CD34+ cells. In embodiments, the HSPC s are characterized as CD34+/CD90+ cells. In embodiments, the HSPCs are characterized as CD34+/CD90+/CD45RA- cells.

[0192] “Stem cell expander” as used herein refers to a compound which causes cells, e.g., HSPCs, HSCs and/or HPCs to proliferate, e.g., increase in number, at a faster rate relative to the same cell types absent said agent. In one exemplary aspect, the stem cell expander is an antagonist of the aryl hydrocarbon receptor pathway. Additional examples of stem cell expanders are provided below. In embodiments, the proliferation, e.g., increase in number, is accomplished ex vivo.

[0193] “Engraftment” or “engraft” refers to the incorporation of a cell or tissue, e.g., a population of HSPCs, into the body of a recipient, e.g., a mammal or human subject. In one example, engraftment includes the growth, expansion and/or differention of the engrafted cells in the recipient. In an example, engraftment of HSPCs includes the differentiation and growth of said HSPCs into erythroid cells within the body of the recipient.

[0194] The term “Hematopoietic progenitor cells” (HPCs) as used herein refers to primitive hematopoietic cells that have a limited capacity for self-renewal and the potential for multilineage differentiation (e.g., myeloid, lymphoid), mono-lineage differentiation (e.g., myeloid or lymphoid) or cell-type restricted differentiation (e.g., erythroid progenitor) depending on placement within the hematopoietic hierarchy (Doulatov et al., Cell Stem Cell 2012).

[0195] “Hematopoietic stem cells” (HSCs) as used herein refer to immature blood cells having the capacity to self-renew and to differentiate into more mature blood cells comprising granulocytes (e.g., promyelocytes, neutrophils, eosinophils, basophils), erythrocytes (e.g., reticulocytes, erythrocytes), thrombocytes (e.g., megakaryoblasts, platelet producing megakaryocytes, platelets), and monocytes (e.g., monocytes, macrophages). HSCs are interchangeably described as stem cells throughout the specification. It is known in the art that such cells may or may not include CD34+ cells. CD34+ cells are immature cells that express the CD34 cell surface marker. CD34+ cells are believed to include a subpopulation of cells with the stem cell properties defined above. It is well known in the art that HSCs are multipotent cells that can give rise to primitive progenitor cells (e.g., multipotent progenitor cells) and/or progenitor cells committed to specific hematopoietic lineages (e.g., lymphoid progenitor cells). The stem cells committed to specific hematopoietic lineages may be of T cell lineage, B cell lineage, dendritic cell lineage, Langerhans cell lineage and/or lymphoid tissue-specific macrophage cell lineage. In addition, HSCs also refer to long term HSC (LT-HSC) and short term HSC (ST-HSC). ST-HSCs are more active and more proliferative than LT-HSCs. However, LT-HSC have unlimited self renewal (i.e., they survive throughout adulthood), whereas ST-HSC have limited self renewal (i.e., they survive for only a limited period of time). Any of these HSCs can be used in any of the methods described herein. Optionally, ST-HSCs are useful because they are highly proliferative and thus, quickly increase the number of HSCs and their progeny. Hematopoietic stem cells are optionally obtained from blood products. A blood product includes a product obtained from the body or an organ of the body containing cells of hematopoietic origin. Such sources include un-fractionated bone marrow, umbilical cord, peripheral blood (e.g., mobilized peripheral blood, e.g., moblized with a mobilization agent such as G-CSF or Plerixafor® (AMD3100), or a combination of G-CSF and Plerixafor® (AMD3100)), liver, thymus, lymph and spleen. All of the aforementioned crude or un-fractionated blood products can be enriched for cells having hematopoietic stem cell characteristics in ways known to those of skill in the art. In an embodiment, HSCs are characterized as CD34+/CD38-/CD90+/CD45RA-. In embodiments, the HSCs are characterized as CD34+/CD90+/CD49f+ cells. In embodiments, the HSCs are characterized as CD34+ cells. In embodiments, the HSCs are characterized as CD34+/CD90+ cells. In embodiments, the HSCs are characterized as CD34+/CD90+/CD45RA- cells.

[0196] “Expansion” or “Expand” in the context of cells refers to an increase in the number of a characteristic cell type, or cell types, from an initial cell population of cells, which may or may not be identical. The initial cells used for expansion may not be the same as the cells generated from expansion.

[0197] “Cell population” refers to eukaryotic mammalian, preferably human, cells isolated from biological sources, for example, blood product or tissues and derived from more than one cell.

[0198] “Enriched” when used in the context of cell population refers to a cell population selected based on the presence of one or more markers, for example, CD34+.

[0199] The term “CD34+ cells” refers to cells that express at their surface CD34 marker. CD34+ cells can be detected and counted using for example flow cytometry and fluorescently labeled anti-CD34 antibodies.

[0200] “Enriched in CD34+ cells” means that a cell population has been selected based on the presence of CD34 marker. Accordingly, the percentage of CD34+ cells in the cell population after selection method is higher than the percentage of CD34+ cells in the initial cell population before selecting step based on CD34 markers. For example, CD34+ cells may represent at least 50%, 60%, 70%, 80% or at least 90% of the cells in a cell population enriched in CD34+ cells.

[0201] The terms “F cell” and “F-cell” refer to cells, ususally erythrocytes (e.g., red blood cells) which contain and/or produce (e.g., express) fetal hemoglobin. For example, an F-cell is a cell that contains or produces detectible levels of fetal hemoglobin. For example, an F-cell is a cell that contains or produces at least 5 picograms of fetal hemoglobin. In another example, an F-cell is a cell that contains or produces at least 6 picograms of fetal hemoglobin. In another example, an F-cell is a cell that contains or produces at least 7 picograms of fetal hemoglobin. In another example, an F-cell is a cell that contains or produces at least 8 picograms of fetal hemoglobin. In another example, an F-cell is a cell that contains or produces at least 9 picograms of fetal hemoglobin. In another example, an F-cell is a cell that contains or produces at least 10 picograms of fetal hemoglobin. Levels of fetal hemoglobin may be measured using an assay described herein or by other method known in the art, for example, flow cytometry using an anti-fetal hemoglobin detection reagent, high performance liquid chromatography, mass spectrometry, or enzyme-linked immunoabsorbent assay.

[0202] An “inhibitor” is a siRNA (e.g., shRNA, miRNA, snoRNA), gRNA, compound or small molecule that inhibits cellular function (e.g., replication) e.g., by binding, partially or totally blocking stimulation, decrease, prevent, or delay activation, or inactivate, desensitize, or down-regulate signal transduction, gene expression or enzymatic activity necessary for protein activity. A “WIZ inhibitor” refers to a substance that results in a detectably lower expression of WIZ gene or WIZ protein or lower activity level of WIZ proteins as compared to those levels without such substance. In some embodiments, a WIZ inhibitor is a small molecule compound (e.g., a small molecule compound that can target WIZ for degradation, also known as “WIZ degrader”). In some embodiments, a WIZ inhibitor is an anti-WIZ shRNA. In some embodiments, a WIZ inhibitor is an anti-WIZ siRNA. In some embodiments, a WIZ inhibitor is an anti-WIZ ASO. In some embodiments, a WIZ inhibitor is an anti-WIZ AMO. In some embodiments, a WIZ inhibitor is an anti-WIZ antisense nucleic acid. In some embodiments, a WIZ inhibitor is a composition or a cell or a population of cells (that comprises gRNA molecules described herein) described herein.

[0203] An “antisense nucleic acid” as referred to herein is a nucleic acid (e.g. DNA or RNA molecule) that is complementary to at least a portion of a specific target nucleic acid (e.g. an mRNA translatable into a protein) and is capable of reducing transcription of the target nucleic acid (e.g. mRNA from DNA) or reducing the translation of the target nucleic acid (e.g. mRNA) or altering transcript splicing (e.g. single stranded morpholino oligo). See, e.g., Weintraub, Scientific American, 262:40 (1990). Typically, synthetic antisense nucleic acids (e.g. oligonucleotides) are generally between 15 and 25 bases in length. Thus, antisense nucleic acids are capable of hybridizing to (e.g. selectively hybridizing to) a target nucleic acid (e.g. target mRNA). In embodiments, the antisense nucleic acid hybridizes to the target nucleic acid sequence (e.g. mRNA) under stringent hybridization conditions. In embodiments, the antisense nucleic acid hybridizes to the target nucleic acid (e.g. mRNA) under moderately stringent hybridization conditions. Antisense nucleic acids may comprise naturally occurring nucleotides or modified nucleotides such as, e.g., phosphorothioate, methylphosphonate, and -anomeric sugar-phosphate, backbone modified nucleotides.

[0204] In the cell, the antisense nucleic acids hybridize to the corresponding mRNA, forming a double-stranded molecule. The antisense nucleic acids interfere with the translation of the mRNA, since the cell will not translate an mRNA that is double-stranded. The use of antisense methods to inhibit the in vitro translation of genes is well known in the art (Marcus-Sakura, Anal. Biochem., 172:289, (1988)). Further, antisense molecules which bind directly to the DNA may be used. Antisense nucleic acids may be single or double stranded nucleic acids. Non-limiting examples of antisense nucleic acids include siRNAs (including their derivatives or pre-cursors, such as nucleotide analogs), short hairpin RNAs (shRNA), micro RNAs (miRNA), saRNAs (small activating RNAs) and small nucleolar RNAs (snoRNA) or certain of their derivatives or precursors.

[0205] An “siRNA” refers to a nucleic acid that forms a double stranded RNA, which double stranded RNA has the ability to reduce or inhibit expression of a gene or target gene when the siRNA is present (e.g. expressed) in the same cell as the gene or target gene. The siRNA is typically about 5 to about 100 nucleotides in length, more typically about 10 to about 50 nucleotides in length, more typically about 15 to about 30 nucleotides in length, most typically about 20-30 base nucleotides, or about 20-25 or about 24-29 nucleotides in length, e.g., 20, 21, 22, 23, 24, 25, 26, 27, 28, 29, or 30 nucleotides in length. siRNA molecules and methods of generating them are described in, e.g., Bass, 2001, Nature, 411, 428-429; Elbashir et al., 2001, Nature, 411, 494-498; WO 00/44895; WO 01/36646; WO 99/32619; WO 00/01846; WO 01/29058; WO 99/07409; and WO 00/44914. A DNA molecule that transcribes dsRNA or siRNA (for instance, as a hairpin duplex) also provides RNAi. DNA molecules for transcribing dsRNA are disclosed in U.S. Pat. No. 6,573,099, and in U.S. Pat. Application Publication Nos. 2002/0160393 and 2003/0027783, and Tuschl and Borkhardt, Molecular Interventions, 2:158 (2002).

[0206] Of the double stranded RNA of an siRNA, the strand that is at least partially complementary to at least a portion of a specific target nucleic acid (e.g. a target nucleic acid sequence), such as an mRNA molecule (e.g. a target mRNA molecule), is called the antisense (or guide strand; and the other strand is called sense (or passenger strand). The passenger strand is degraded and the guide strand is incorporated into the RNA-induced silencing complex (RISC).

[0207] A short hairpin RNA or small hairpin RNA (shRNA/Hairpin Vector) is an artificial RNA molecule with a tight hairpin turn that can be used to silence target gene expression via RNA interference (RNAi).

[0208] Antisense oligonucleotides (ASOs) are single strands of DNA or RNA that are complementary to a chosen sequence. In the case of antisense RNA they prevent protein translation of certain messenger RNA strands by binding to them, in a process called hybridization. Antisense oligonucleotides can be used to target a specific, complementary (coding or non-coding) RNA. If binding takes place this hybrid can be degraded by the enzyme RNase H.

[0209] Anti-miRNA Oligonucleotides (also known as AMOs) refer to synthetically designed molecules (e.g., oligonucleotides) that are used to neutralize microRNA (miRNA) function in cells for desired responses.

[0210] The term “miRNA” is used in accordance with its plain ordinary meaning and refers to a small non-coding RNA molecule capable of post-transcriptionally regulating gene expression. In one embodiment, a miRNA is a nucleic acid that has substantial or complete identity to a target gene. In embodiments, the miRNA inhibits gene expression by interacting with a complementary cellular mRNA thereby interfering with the expression of the complementary mRNA. Typically, the miRNA is at least about 15-50 nucleotides in length (e.g., each complementary sequence of the miRNA is 15-50 nucleotides in length, and the miRNA is about 15-50 base pairs in length). In other embodiments, the length is 20-30 base nucleotides, preferably about 20-25 or about 24-29 nucleotides in length, e.g., 20, 21, 22, 23, 24, 25, 26, 27, 28, 29, or 30 nucleotides in length.

[0211] “Nucleic acid” refers to deoxyribonucleotides or ribonucleotides and polymers thereof in either single-,double- or multiple-stranded form, or complements thereof. The term “polynucleotide” or “oligonuceltodie” refers to a linear sequence of nucleotides. The term “nucleotide” typically refers to a single unit of a polynucleotide, i.e., a monomer. Nucleotides can be ribonucleotides, deoxyribonucleotides, or modified versions thereof. Examples of polynucleotides contemplated herein include single and double stranded DNA, single and double stranded RNA (including siRNA), and hybrid molecules having mixtures of single and double stranded DNA and RNA. Nucleic acids can be linear or branched. For example, nucleic acids can be a linear chain of nucleotides or the nucleic acids can be branched, e.g., such that the nucleic acids comprise one or more arms or branches of nucleotides. Optionally, the branched nucleic acids are repetitively branched to form higher ordered structures such as dendrimers and the like.

[0212] The terms also encompass nucleic acids containing known nucleotide analogs or modified backbone residues or linkages, which are synthetic, naturally occurring, and non-naturally occurring, which have similar binding properties as the reference nucleic acid, and which are metabolized in a manner similar to the reference nucleotides. Examples of such analogs include, without limitation, phosphodiester derivatives including, e.g., phosphoramidate, phosphorodiamidate, phosphorothioate (also known as phosphothioate), phosphorodithioate, phosphonocarboxylic acids, phosphonocarboxylates, phosphonoacetic acid, phosphonoformicacid, methyl phosphonate, boron phosphonate, or O-methylphosphoroamidite linkages (see Eckstein, Oligonucleotides and Analogues: A Practical Approach, Oxford University Press); and peptide nucleic acid backbones and linkages. Other analog nucleic acids include those with positive backbones; non-ionic backbones, modified sugars, and nonribose backbones (e.g. phosphorodiamidate morpholino oligos or locked nucleic acids (LNA)), including those described in U.S. Pat. Nos. 5,235,033 and 5,034,506, and Chapters 6 and 7, ASC Symposium Series 580, Carbohydrate Modifications in Antisense Research, Sanghui & Cook, eds.

[0213] Nucleic acids containing one or more carbocyclic sugars are also included within one definition of nucleic acids. Modifications of the ribose-phosphate backbone may be done for a variety of reasons, e.g., to increase the stability and half-life of such molecules in physiological environments or as probes on a biochip. Mixtures of naturally occurring nucleic acids and analogs can be made; alternatively, mixtures of different nucleic acid analogs, and mixtures of naturally occurring nucleic acids and analogs may be made. In embodiments, the internucleotide linkages in DNA are phosphodiester, phosphodiester derivatives, or a combination of both.

[0214] Unless otherwise stated, all genome or chromosome coordinates are are according to hg38.

[0215] The gRNA molecules, compositions and methods described herein relate to genome editing in eukaryotic cells using the CRISPR/Cas9 system. In particular, the gRNA molecules, compositions and methods described herein relate to regulation of globin levels and are useful, for example, in regulating expression and production of globin genes and protein. The gRNA molecules, compositions and methods can be useful in the treatment of hemoglobinopathies.

### I. gRNA Molecules

[0216] A gRNA molecule may have a number of domains, as described more fully below, however, a gRNA molecule typically comprises at least a crRNA domain (comprising a targeting domain) and a tracr. The gRNA molecules of the invention, used as a component of a CRISPR system, are useful for modifying (e.g., modifying the sequence) DNA at or near a target site. Such modifications include deletions and or insertions that result in, for example, reduced or eliminated expression of a functional product of the gene comprising the target site. These uses, and additional uses, are described more fully below.

[0217] In an embodiment, a unimolecular, or sgRNA comprises, preferably from 5′ to 3′ : a crRNA (which contains a targeting domain complementary to a target sequence and a region that forms part of a flagpole (i.e., a crRNA flagpole region)); a loop; and a tracr (which contains a domain complementary to the crRNA flagpole region, and a domain which additionally binds a nuclease or other effector molecule, e.g., a Cas molecule, e.g., aCas9 molecule), and may take the following format (from 5′ to 3′):

[0218] [targeting domain] - [crRNA flagpole region] - [optional first flagpole extension] - [loop] - [optional first tracr extension] - [tracr flagpole region] - [tracr nuclease binding domain].

[0219] In embodiments, the tracr nuclease binding domain binds to a Cas protein, e.g., a Cas9 protein.

[0220] In an embodiment, a bimolecular, or dgRNA comprises two polynucleotides; the first, preferably from 5′ to 3′: a crRNA (which contains a targeting domain complementary to a target sequence and a region that forms part of a flagpole; and the second, preferrably from 5′ to 3′ : a tracr (which contains a domain complementary to the crRNA flagpole region, and a domain which additionally binds a nuclease or other effector molecule, e.g., a Cas molecule, e.g., Cas9 molecule), and may take the following format (from 5′ to 3′):
[0221] Polynucleotide 1 (crRNA): [targeting domain] - [crRNA flagpole region] - [optional first flagpole extension] - [optional second flagpole extension]
[0222] Polynucleotide 2 (tracr): [optional first tracr extension] - [tracr flagpole region] - [tracr nuclease binding domain]

[0223] In embodiments, the tracr nuclease binding domain binds to a Cas protein, e.g., a Cas9 protein.

[0224] In some aspects, the targeting domain comprises or consists of a targeting domain sequence described herein, e.g., a targeting domain described in Table 1-Table 3, or a targeting domain comprising or consisting of 17, 18, 19, or 20 (preferably 20) consecutive nucleotides of a targeting domain sequence described in Table 1-Table 3.

[0225] In some aspects, the flagpole, e.g., the crRNA flagpole region, comprises, from 5′ to 3′

GUUUUAGAGCUA (SEQ ID NO: 3110).

[0226] In some aspects, the flagpole, e.g., the crRNA flagpole region, comprises, from 5′ to 3′:

GUUUAAGAGCUA (SEQ ID NO: 3111).

[0227] In some aspects the loop comprises, from 5′ to 3′:

GAAA (SEQ ID NO: 3114).

[0228] In some aspects the tracr comprises, from 5′ to 3′:

UAGCAAGUUAAAAUAAGGCUAGUCCGUUAUCAACUUGAAAAAGUGGCACC
GAGUCGGUGC (SEQ ID NO: 3115)

and is preferably used in a gRNA molecule comprising SEQ ID NO: 3110.

[0229] In some aspects the tracr comprises, from 5′ to 3′:

UAGCAAGUUUAAAUAAGGCUAGUCCGUUAUCAACUUGAAAAAGUGGCACC
GAGUCGGUGC (SEQ ID NO: 3116)

and is preferably used in a gRNA molecule comprising SEQ ID NO: 3111.

[0230] In some aspects, the gRNA may also comprise, at the 3′ end, additional U nucleic acids. For example the gRNA may comprise an additional 1, 2, 3, 4, 5, 6, 7, 8, 9, or 10 U nucleic acids (SEQ ID NO: 3177) at the 3′ end. In an embodiment, the gRNA comprises an additional 4 U nucleic acids at the 3′ end. In the case of dgRNA, one or more of the polynucleotides of the dgRNA (e.g., the polynucleotide comprising the targeting domain and the polynucleotide comprising the tracr) may comprise, at the 3′ end, additional U nucleic acids. For example, the case of dgRNA, one or more of the polynucleotides of the dgRNA (e.g., the polynucleotide comprising the targeting domain and the polynucleotide comprising the tracr) may comprise an additional 1, 2, 3, 4, 5, 6, 7, 8, 9, or 10 U nucleic acids (SEQ ID NO: 3177) at the 3′ end. In an embodiment, in the case of dgRNA, one or more of the polynucleotides of the dgRNA (e.g., the polynucleotide comprising the targeting domain and the polynucleotide comprising the tracr) comprises an additional 4 U nucleic acids at the 3′ end. In an embodiment of a dgRNA, only the polynucleotide comprising the tracr comprises the additional U nucleic acid(s), e.g., 4 U nucleic acids. In an emebodiment of a dgRNA, only the polynucleotide comprising the targeting domain comprises the additional U nucleic acid(s). In an embodiment of a dgRNA, both the polynucleotide comprising the targeting domain and the polynucleotide comprising the tracr comprise the additional U nucleic acids, e.g., 4 U nucleic acids.

[0231] In some aspects, the gRNA may also comprise, at the 3′ end, additional A nucleic acids. For example the gRNA may comprise an additional 1, 2, 3, 4, 5, 6, 7, 8, 9, or 10 A nucleic acids (SEQ ID NO: 3178) at the 3′ end. In an embodiment, the gRNA comprises an additional 4 A nucleic acids at the 3′ end. In the case of dgRNA, one or more of the polynucleotides of the dgRNA (e.g., the polynucleotide comprising the targeting domain and the polynucleotide comprising the tracr) may comprise, at the 3′ end, additional A nucleic acids. For example, the case of dgRNA, one or more of the polynucleotides of the dgRNA (e.g., the polynucleotide comprising the targeting domain and the polynucleotide comprising the tracr) may comprise an additional 1, 2, 3, 4, 5, 6, 7, 8, 9, or 10 A nucleic acids (SEQ ID NO: 3178) at the 3′ end. In an embodiment, in the case of dgRNA, one or more of the polynucleotides of the dgRNA (e.g., the polynucleotide comprising the targeting domain and the polynucleotide comprising the tracr) comprises an additional 4 A nucleic acids at the 3′ end. In an embodiment of a dgRNA, only the polynucleotide comprising the tracr comprises the additional A nucleic acid(s), e.g., 4 A nucleic acids. In an emebodiment of a dgRNA, only the polynucleotide comprising the targeting domain comprises the additional A nucleic acid(s). In an embodiment of a dgRNA, both the polynucleotide comprising the targeting domain and the polynucleotide comprising the tracr comprise the additional U nucleic acids, e.g., 4 A nucleic acids.

[0232] In embodiments, one or more of the polynucleotides of the gRNA molecule may comprise a cap at the 5′ end.

[0233] In an embodiment, a unimolecular, or sgRNA comprises, preferably from 5′ to 3′: a crRNA (which contains a targeting domain complementary to a target sequence; a crRNA flagpole region; first flagpole extension; a loop; a first tracr extension (which contains a domain complementary to at least a portion of the first flagpole extension); and a tracr (which contains a domain complementary to the crRNA flagpole region, and a domain which additionally binds a Cas9 molecule). In some aspects, the targeting domain comprises a targeting domain sequence described herein, e.g., a targeting domain described in Table 1-Table 3, or a targeting domain comprising or consisting of 17, 18, 19, or 20 (preferably 20) consecutive nucleotides of a targeting domain sequence described in Table 1-Table 3, for example the 3′ 17, 18, 19, or 20 (preferably 20) consecutive nucleotides of a targeting domain sequence described in Table 1-Table 3.

[0234] In aspects comprising a first flagpole extension and/or a first tracr extension, the flagpole, loop and tracr sequences may be as described above. In general any first flagpole extension and first tracr extension may be employed, provided that they are complementary. In embodiments, the first flagpole extension and first tracr extension consist of 3, 4, 5, 6, 7, 8, 9, 10 or more complementary nucleotides.

[0235] In some aspects, the first flagpole extension comprises, from 5′ to 3′:

UGCUG (SEQ ID NO: 3112).

In some aspects, the first flagpole extension consists of SEQ ID NO: 3112.

[0236] In some aspects, the first tracr extension comprises, from 5′ to 3′:

CAGCA (SEQ ID NO: 3117).

In some aspects, the first tracr extension consists of SEQ ID NO: 3117.

[0237] In an embodiment, a dgRNA comprises two nucleic acid molecules. In some aspects, the dgRNA comprises a first nucleic acid which contains, preferably from 5′ to 3′ : a targeting domain complementary to a target sequence; a crRNA flagpole region; optionally a first flagpole extension; and, optionally, a second flagpole extension; and a second nucleic acid (which may be referred to herein as a tracr), and comprises at least a domain which binds a Cas molecule, e.g., a Cas9 molecule) comprising preferably from 5′ to 3′: optionally a first tracr extension; and a tracr (which contains a domain complementary to the crRNA flagpole region, and a domain which additionally binds a Cas, e.g., Cas9, molecule). The second nucleic acid may additionally comprise, at the 3′ end (e.g., 3′ to the tracr) additional U nucleic acids. For example the tracr may comprise an additional 1, 2, 3, 4, 5, 6, 7, 8, 9, or 10 U nucleic acids (SEQ ID NO: 3177) at the 3′ end (e.g., 3′ to the tracr). The second nucleic acid may additionally or alternately comprise, at the 3′ end (e.g., 3′ to the tracr) additional A nucleic acids. For example the tracr may comprise an additional 1, 2, 3, 4, 5, 6, 7, 8, 9, or 10 A nucleic acids (SEQ ID NO: 3178) at the 3′ end (e.g., 3′ to the tracr). In some aspects, the targeting domain comprises a targeting domain sequence described herein, e.g., a targeting domain described in Table 1-Table 3, or a targeting domain comprising or consisting of 17, 18, 19, or 20 (preferably 20) consecutive nucleotides of a targeting domain sequence described in Table 1-Table 3.

[0238] In aspects involving a dgRNA, the crRNA flagpole region, optional first flagpole extension, optional first tracr extension and tracr sequences may be as described above.

[0239] In some aspects, the optional second flagpole extension comprises, from 5′ to 3′:

UUUUG (SEQ ID NO: 3113).

[0240] In embodiments, the 3′ 1, 2, 3, 4, or 5 nucleotides, the 5′ 1, 2, 3, 4, or 5 nucleotides, or both the 3′ and 5′ 1, 2, 3, 4, or 5 nucleotides of the gRNA molecule (and in the case of a dgRNA molecule, the polynucleotide comprising the targeting domain and/or the polynucleotide comprising the tracr) are modified nucleic acids, as described more fully in section XIII, below.

[0241] The domains are discussed briefly below:

### 1) The Targeting Domain

[0242] Guidance on the selection of targeting domains can be found, e.g., in Fu Y el al. NAT BIOTECHNOL 2014 (doi: 10.1038/nbt.2808) and Sternberg SH el al. NATURE 2014 (doi: 10.1038/naturel3011).

[0243] The targeting domain comprises a nucleotide sequence that is complementary, e.g., at least 80, 85, 90, 95, or 99% complementary, e.g., fully complementary, to the target sequence on the target nucleic acid. The targeting domain is part of an RNA molecule and will therefore comprise the base uracil (U), while any DNA encoding the gRNA molecule will comprise the base thymine (T). While not wishing to be bound by theory, it is believed that the complementarity of the targeting domain with the target sequence contributes to specificity of the interaction of the gRNA molecule/Cas9 molecule complex with a target nucleic acid. It is understood that in a targeting domain and target sequence pair, the uracil bases in the targeting domain will pair with the adenine bases in the target sequence.

[0244] In an embodiment, the targeting domain is 5 to 50, e.g., 10 to 40, e.g., 10 to 30, e.g., 15 to 30, e.g., 15 to 25 nucleotides in length. In an embodiment, the targeting domain is 15, 16, 17, 18, 19, 20, 21, 22, 23, 24 or 25 nucleotides in length. In an embodiment, the targeting domain is 16 nucleotides in length. In an embodiment, the targeting domain is 17 nucleotides in length. In an embodiment, the targeting domain is 18 nucleotides in length. In an embodiment, the targeting domain is 19 nucleotides in length. In an embodiment, the targeting domain is 20 nucleotides in length. In embodiments, the aforementioned 16, 17, 18, 19, or 20 nucleotides comprise the 5′- 16, 17, 18, 19, or 20 nucleotides from a targeting domain described in Table 1-Table 3. In embodiments, the aforementioned 16, 17, 18, 19, or 20 nucleotides comprise the 3′- 16, 17, 18, 19, or 20 nucleotides from a targeting domain described in Table 1-Table 3.

[0245] Without being bound by theory, it is believed that the 8, 9, 10, 11 or 12 nucleic acids of the targeting domain disposed at the 3′ end of the targeting domain is important for targeting the target sequence, and may thus be referred to as the “core” region of the targeting domain. In an embodiment, the core domain is fully complementary with the target sequence.

[0246] The strand of the target nucleic acid with which the targeting domain is complementary is referred to herein as the target sequence. In some aspects, the target sequence is disposed on a chromosome, e.g., is a target within a gene. In some aspects the target sequence is disposed within an exon of a gene. In some aspects the target sequence is disposed within an intron of a gene. In some aspects, the target sequence comprises, or is proximal (e.g., within 10, 20, 30, 40, 50, 100, 200, 300, 400, 500, or 1000 nucleic acids) to a binding site of a regulatory element, e.g., a promoter or transcription factor binding site, of a gene of interest. Some or all of the nucleotides of the domain can have a modification, e.g., modification found in Section XIII herein.

### 2) crRNA Flagpole Region

[0247] The flagpole contains portions from both the crRNA and the tracr. The crRNA flagpole region is complementary with a portion of the tracr, and in an embodiment, has sufficient complementarity to a portion of the tracr to form a duplexed region under at least some physiological conditions, for example, normal physiological conditions. In an embodiment, the crRNA flagpole region is 5 to 30 nucleotides in length. In an embodiment, the crRNA flagpole region is 5 to 25 nucleotides in length. The crRNA flagpole region can share homology with, or be derived from, a naturally occurring portion of the repeat sequence from a bacterial CRISPR array. In an embodiment, it has at least 50% homology with a crRNA flagpole region disclosed herein, e.g., an S.pyogenes, or S.thermophilus, crRNA flagpole region.

[0248] In an embodiment, the flagpole, e.g., the crRNA flagpole region, comprises SEQ ID NO: 3110. In an embodiment, the flagpole, e.g., the crRNA flagpole region, comprises sequence having at least 50%, 60%, 70%, 80%, 85%, 90%, 95% or 99% homology with SEQ ID NO: 3110. In an embodiment, the flagpole, e.g., the crRNA flagpole region, comprises at least 5, 6, 7, 8, 9, 10, or 11 nucleotides of SEQ ID NO: 3110. In an embodiment, the flagpole, e.g., the crRNA flagpole region, comprises SEQ ID NO: 3111. In an embodiment, the flagpole comprises sequence having at least 50%, 60%, 70%, 80%, 85%, 90%, 95% or 99% homology with SEQ ID NO: 3111. In an embodiment, the flagpole, e.g., the crRNA flagpole region, comprises at least 5, 6, 7, 8, 9, 10, or 11 nucleotides of SEQ ID NO: 3111.

[0249] Some or all of the nucleotides of the domain can have a modification, e.g., modification described in Section XIII herein.

### 3) First Flagpole Extension

[0250] When a tracr comprising a first tracr extension is used, the crRNA may comprise a first flagpole extension. In general any first flagpole extension and first tracr extension may be employed, provided that they are complementary. In embodiments, the first flagpole extension and first tracr extension consist of 3, 4, 5, 6, 7, 8, 9, 10 or more complementary nucleotides.

[0251] The first flagpole extension may comprise nucleotides that are complementary, e.g., 80%, 85%, 90%, 95% or 99%, e.g., fully complementary, with nucleotides of the first tracr extension. In some aspects, the first flagpole extension nucleotides that hybridize with complementary nucleotides of the first tracr extension are contiguous. In some aspects, the first flagpole extension nucleotides that hybridize with complementary nucleotides of the first tracr extension are discontinuous, e.g., comprises two or more regions of hybridization separated by nucleotides that do not base pair with nucleotides of the first tracr extension. In some aspects, the first flagpole extension comprises at least 2, 3, 4, 5, 6, 7, 8, 9, 10, 11, 12, 13, 14, 15, 16, 17, 18, 19, 20 or more nucleotides. In some aspects, the first flagpole extension comprises, from 5′ to 3′:

UGCUG (SEQ ID NO: 3112).

In some aspects, the first flagpole extension consists of SEQ ID NO: 3112. In some aspects the first flagpole extension comprises nucleic acid that is at least 80%, 85%, 90%, 95% or 99% homology to SEQ ID NO: 3112.

[0252] Some or all of the nucleotides of the first tracr extension can have a modification, e.g., modification found in Section XIII herein.

### 3) The Loop

[0253] A loop serves to link the crRNA flagpole region (or optionally the first flagpole extension, when present) with the tracr (or optionally the first tracr extension, when present) of a sgRNA. The loop can link the crRNA flagpole region and tracr covalently or non-covalently. In an embodiment, the linkage is covalent. In an embodiment, the loop covalently couples the crRNA flagpole region and tracr. In an embodiment, the loop covalently couples the first flagpole extension and the first tracr extension. In an embodiment, the loop is, or comprises, a covalent bond interposed between the crRNA flagpole region and the domain of the tracr which hybridizes to the crRNA flagpole region. Typically, the loop comprises one or more, e.g., 2, 3, 4, 5, 6, 7, 8, 9, or 10 nucleotides.

[0254] In dgRNA molecules the two molecules can be associated by virtue of the hybridization between at least a portion of the crRNA (e.g., the crRNA flagpole region) and at least a portion of the tracr (e.g., the domain of the tracr which is complementary to the crRNA flagpole region).

[0255] A wide variety of loops are suitable for use in sgRNAs. Loops can consist of a covalent bond, or be as short as one or a few nucleotides, e.g., 1, 2, 3, 4, or 5 nucleotides in length. In an embodiment, a loop is 2, 3, 4, 5, 6, 7, 8, 9, 10, 15, 20, or 25 or more nucleotides in length. In an embodiment, a loop is 2 to 50, 2 to 40, 2 to 30, 2 to 20, 2 to 10, or 2 to 5 nucleotides in length. In an embodiment, a loop shares homology with, or is derived from, a naturally occurring sequence. In an embodiment, the loop has at least 50% homology with a loop disclosed herein. In an embodiment, the loop comprises SEQ ID NO: 3114.

[0256] Some or all of the nucleotides of the domain can have a modification, e.g., modification described in Section XIII herein.

### 4) The Second Flagpole Extension

[0257] In an embodiment, a dgRNA can comprise additional sequence, 3′ to the crRNA flagpole region or, when present, the first flagpole extension, referred to herein as the second flagpole extension. In an embodiment, the second flagpole extension is, 2-10, 2-9, 2-8, 2-7, 2-6, 2-5, or 2-4 nucleotides in length. In an embodiment, the second flagpole extension is 2, 3, 4, 5, 6, 7, 8, 9, or 10 or more nucleotides in length. In an embodiment, the second flagpole extension comprises SEQ ID NO: 3113.

### 5) The Tracr

[0258] The tracr is the nucleic acid sequence required for nuclease, e.g., Cas9, binding. Without being bound by theory, it is believed that each Cas9 species is associated with a particular tracr sequence. Tracr sequences are utilized in both sgRNA and in dgRNA systems. In an embodiment, the tracr comprises sequence from, or derived from, an S.pyogenes tracr. In some aspects, the tracr has a portion that hybridizes to the flagpole portion of the crRNA, e.g., has sufficient complementarity to the crRNA flagpole region to form a duplexed region under at least some physiological conditions (sometimes referred to herein as the tracr flagpole region or a tracr domain complementary to the crRNA flagpole region). In embodiments, the domain of the tracr that hybridizes with the crRNA flagpole region comprises at least 5, 6, 7, 8, 9, 10, 11, 12, 13, 14, 15, 16, 17, 18, 19, or 20 nucleotides that hybridize with complementary nucleotides of the crRNA flagpole region. In some aspects, the tracr nucleotides that hybridize with complementary nucleotides of the crRNA flagpole region are contiguous. In some aspects, the tracr nucleotides that hybridize with complementary nucleotides of the crRNA flagpole region are discontinuous, e.g., comprises two or more regions of hybridization separated by nucleotides that do not base pair with nucleotides of the crRNA flagpole region. In some aspects, the portion of the tracr that hybridizes to the crRNA flagpole region comprises, from 5′ to 3′:

UAGCAAGUUAAAA(SEQ ID NO: 3119).

In some aspects, the portion of the tracr that hybridizes to the crRNA flagpole regioncomprises, from 5′ to 3′:

UAGCAAGUUUAAA (SEQ ID NO: 3120).

In embodiments, the sequence that hybridizes with the crRNA flagpole region is disposed on the tracr 5′- to the sequence of the tracr that additionally binds a nuclease, e.g., a Cas molecule, e.g., a Cas9 molecule.

[0259] The tracr further comprises a domain that additionally binds to a nuclease, e.g., a Cas molecule, e.g., a Cas9 molecule. Without being bound by theory, it is believed that Cas9 from different species bind to different tracr sequences. In some aspects, the tracr comprises sequence that binds to a S.pyogenes Cas9 molecule. In some aspects, the tracr comprises sequence that binds to a Cas9 molecule disclosed herein. In some aspects, the domain that additionally binds a Cas9 molecule comprises, from 5′ to 3′:

UAAGGCUAGUCCGUUAUCAACUUGAAAAAGUGGCACCGAGUCGGUGC (S
EQ ID NO: 3121).

In some aspects the domain that additionally binds a Cas9 molecule comprises, from 5′ to 3′:

UAAGGCUAGUCCGUUAUCAACUUGAAAAAGUGGCACCGAGUCGGUGCUUU
U (SEQ ID NO: 3122).

[0260] In some embodiments, the tracr comprises SEQ ID NO: 3115. In some embodiments, the tracr comprises SEQ ID NO: 3116.

[0261] Some or all of the nucleotides of the tracr can have a modification, e.g., modification found in Section XIII herein. In embodiments, the gRNA (e.g., the sgRNA or the tracr and/or crRNA of a dgRNA), e.g., any of the gRNA or gRNA components described above, comprises an inverted abasic residue at the 5′ end, the 3′ end or both the 5′ and 3′ end of the gRNA. In embodiments, the gRNA (e.g., the sgRNA or the tracr and/or crRNA of a dgRNA), e.g., any of the gRNA or gRNA components described above, comprises one or more phosphorothioate bonds between residues at the 5′ end of the polynucleotide, for example, a phosphrothioate bond between the first two 5′ residues, between each of the first three 5′ residues, between each of the first four 5′ residues, or between each of the first five 5′ residues. In embodiments, the gRNA or gRNA component may alternatviely or additionally comprise one or more phosphorothioate bonds between residues at the 3′ end of the polynucleotide, for example, a phosphrothioate bond between the first two 3′ residues, between each of the first three 3′ residues, between each of the first four 3′ residues, or between each of the first five 3′ residues. In an embodiment, the gRNA (e.g., the sgRNA or the tracr and/or crRNA of a dgRNA), e.g., any of the gRNA or gRNA components described above, comprises a phosphorothioate bond between each of the first four 5′ residues (e.g., comprises, e.g., consists of, three phosphorothioate bonds at the 5′ end(s)), and a phosphorothioate bond between each of the first four 3′ residues (e.g., comprises, e.g., consists of, three phosphorothioate bonds at the 3′ end(s)). In an embodiment, any of the phosphorothioate modificaitons described above are combined with an inverted abasic residue at the 5′ end, the 3′ end, or both the 5′ and 3′ ends of the polynucleotide. In such embodiments, the inverted abasic nucleotide may be linked to the 5′ and/or 3′ nucelotide by a phosphate bond or a phosphorothioate bond. In embodiments, the gRNA (e.g., the sgRNA or the tracr and/or crRNA of a dgRNA), e.g., any of the gRNA or gRNA components described above, comprises one or more nucleotides that include a 2′ O-methyl modification. In embodiments, each of the first 1, 2, 3, or more of the 5′ residues comprise a 2′ O-methyl modification. In embodiments, each of the first 1, 2, 3, or more of the 3′ residues comprise a 2′ O-methyl modification. In embodiments, the 4^{th}-to-terminal, 3^{rd}-to-terminal, and 2^{nd}-to-terminal 3′ residues comprise a 2′ O-methyl modification. In embodiments, each of the first 1, 2, 3 or more of the 5′ residues comprise a 2′ O-methyl modification, and each of the first 1, 2, 3 or more of the 3′ residues comprise a 2′ O-methyl modification. In an embodiment, each of the first 3 of the 5′ residues comprise a ′ O-methyl modification, and each of the first 3 of the 3′ residues comprise a 2′ O-methyl modification. In embodiments, each of the first 3 of the 5′ residues comprise a 2′ O-methyl modification, and the 4^{th}-to-terminal, 3^{rd}-to-terminal, and 2^{nd}-to-terminal 3′ residues comprise a 2′ O-methyl modification. In embodiments, any of the 2′ O-methyl modfications, e.g., as described above, may be combined with one or more phosphorothioate modifications, e.g., as described above, and/or one or more inverted abasic modifications, e.g., as described above. In an embodiment, the gRNA (e.g., the sgRNA or the tracr and/or crRNA of a dgRNA), e.g., any of the gRNA or gRNA components described above, comprises, e.g., consists of, a phosphorothioate bond between each of the first four 5′ residues (e.g., comprises, e.g., consists of three phosphorothioate bonds at the 5′ end of the polynucleotide(s)), a phosphorothioate bond between each of the first four 3′ residues (e.g., comprises, e.g., consists of three phosphorothioate bonds at the 5′ end of the polynucleotide(s)), a 2′ O-methyl modification at each of the first three 5′ residues, and a 2′ O-methyl modification at each of the first three 3′ residues. In an embodiment, the gRNA (e.g., the sgRNA or the tracr and/or crRNA of a dgRNA), e.g., any of the gRNA or gRNA components described above, comprises, e.g., consists of, a phosphorothioate bond between each of the first four 5′ residues (e.g., comprises, e.g., consists of three phosphorothioate bonds at the 5′ end of the polynucleotide(s)), a phosphorothioate bond between each of the first four 3′ residues (e.g., comprises, e.g., consists of three phosphorothioate bonds at the 5′ end of the polynucleotide(s)), a 2′ O-methyl modification at each of the first three 5′ residues, and a 2′ O-methyl modification at each of the 4^{th}-to-terminal, 3^{rd}-to-terminal, and 2^{nd}-to-terminal 3′ residues.

[0262] In an embodiment, the gRNA (e.g., the sgRNA or the tracr and/or crRNA of a dgRNA), e.g., any of the gRNA or gRNA components described above, comprises, e.g., consists of, a phosphorothioate bond between each of the first four 5′ residues (e.g., comprises, e.g., consists of three phosphorothioate bonds at the 5′ end of the polynucleotide(s)), a phosphorothioate bond between each of the first four 3′ residues (e.g., comprises, e.g., consists of three phosphorothioate bonds at the 5′ end of the polynucleotide(s)), a 2′ O-methyl modification at each of the first three 5′ residues, a 2′ O-methyl modification at each of the first three 3′ residues, and an additional inverted abasic residue at each of the 5′ and 3′ ends.

[0263] In an embodiment, the gRNA (e.g., the sgRNA or the tracr and/or crRNA of a dgRNA), e.g., any of the gRNA or gRNA components described above, comprises, e.g., consists of, a phosphorothioate bond between each of the first four 5′ residues (e.g., comprises, e.g., consists of three phosphorothioate bonds at the 5′ end of the polynucleotide(s)), a phosphorothioate bond between each of the first four 3′ residues (e.g., comprises, e.g., consists of three phosphorothioate bonds at the 5′ end of the polynucleotide(s)), a 2′ O-methyl modification at each of the first three 5′ residues, and a 2′ O-methyl modification at each of the 4^{th}-to-terminal, 3^{rd}-to-terminal, and 2^{nd}-to-terminal 3′ residues, and an additional inverted abasic residue at each of the 5′ and 3′ ends.

[0264] In an embodiment, the gRNA is a dgRNA and comprises, e.g., consists of:
[0265] crRNA:

mN*mN*mN*NNNNNNNNNNNNNNNNNGUUUUAGAGCUAU*mG*mC*mU (
SEQ ID NO:3179),

[0266] where m indicates a base with 2′O-Methyl modification, * indicates a phosphorothioate bond, and N′s indicate the residues of the targeting domain, e.g., as described herein, (optionally with an inverted abasic residue at the 5′ and/or 3′ terminus); and
[0267] tracr:

AACAGCAUAGCAAGUUAAAAUAAGGCUAGUCCGUUAUCAACUUGAAAAAG
UGGCACCGAGUCGGUGCUUUUUUU (SEQ ID NO: 3152)

[0268] (optionally with an inverted abasic residue at the 5′ and/or 3′ terminus).

[0269] In an embodiment, the gRNA is a dgRNA and comprises, e.g., consists of:
[0270] crRNA:

mN*mN*mN*NNNNNNNNNNNNNNNNNGUUUUAGAGCUAU*mG*mC*mU (
SEQ ID NO: 3179),

[0271] where m indicates a base with 2′O-Methyl modification, * indicates a phosphorothioate bond, and N′s indicate the residues of the targeting domain, e.g., as described herein, (optionally with an inverted abasic residue at the 5′ and/or 3′ terminus); and
[0272] tracr:

mA*mA*mC*AGCAUAGCAAGUUAAAAUAAGGCUAGUCCGUUAUCAACUUG
AAAAAGUGGCACCGAGUCGGUGCUUUU*mU*mU*mU (SEQ ID NO: 3
174),

[0273] where m indicates a base with 2′O-Methyl modification, * indicates a phosphorothioate bond, and N′s indicate the residues of the targeting domain, e.g., as described herein, (optionally with an inverted abasic residue at the 5′ and/or 3′ terminus).

[0274] In an embodiment, the gRNA is a dgRNA and comprises, e.g., consists of:
[0275] crRNA:

mN*mN*mN*NNNNNNNNNNNNNNNNNGUUUUAGAGCUAUGCUGUU*mU*m
U*mG (SEQ ID NO: 3180),

[0276] where m indicates a base with 2′O-Methyl modification, * indicates a phosphorothioate bond, and N′s indicate the residues of the targeting domain, e.g., as described herein, (optionally with an inverted abasic residue at the 5′ and/or 3′ terminus); and
[0277] tracr:

AACAGCAUAGCAAGUUAAAAUAAGGCUAGUCCGUUAUCAACUUGAAAAAG
UGGCACCGAGUCGGUGCUUUUUUU (SEQ ID NO: 3152)

[0278] (optionally with an inverted abasic residue at the 5′ and/or 3′ terminus).

[0279] In an embodiment, the gRNA is a dgRNA and comprises, e.g., consists of:
[0280] crRNA:

mN*mN*mN*NNNNNNNNNNNNNNNNNGUUUUAGAGCUAUGCUGUU*mU*m
U*mG (SEQ ID NO: 3180),

[0281] where m indicates a base with 2′O-Methyl modification, * indicates a phosphorothioate bond, and N’s indicate the residues of the targeting domain, e.g., as described herein, (optionally with an inverted abasic residue at the 5′ and/or 3′ terminus); and
[0282] tracr:

mA*mA*mC*AGCAUAGCAAGUUAAAAUAAGGCUAGUCCGUUAUCAACUUG
AAAAAGUGGCACCGAGUCGGUGCUUUU*mU*mU*mU (SEQ ID NO: 3
174),

[0283] where m indicates a base with 2′O-Methyl modification, and * indicates a phosphorothioate bond (optionally with an inverted abasic residue at the 5′ and/or 3′ terminus).

[0284] In an embodiment, the gRNA is a dgRNA and comprises, e.g., consists of:
[0285] crRNA:

NNNNNNNNNNNNNNNNNNNNGUUUUAGAGCUAUGCUGUUUUG (SEQ ID
NO: 3181),

[0286] where N′s indicate the residues of the targeting domain, e.g., as described herein, (optionally with an inverted abasic residue at the 5′ and/or 3′ terminus); and
[0287] tracr:

mA*mA*mC*AGCAUAGCAAGUUAAAAUAAGGCUAGUCCGUUAUCAACUUG
AAAAAGUGGCACCGAGUCGGUGCUUUU*mU*mU*mU (SEQ ID NO: 3
174),

[0288] where m indicates a base with 2′O-Methyl modification, and * indicates a phosphorothioate bond (optionally with an inverted abasic residue at the 5′ and/or 3′ terminus).

[0289] In an embodiment, the gRNA is a sgRNA and comprises, e.g., consists of:

NNNNNNNNNNNNNNNNNNNNGUUUUAGAGCUAGAAAUAGCAAGUUAAAAU
AAGGCUAGUCCGUUAUCAACUUGAAAAAGUGGCACCGAGUCGGUGCUUUU
(SEQ ID NO: 3182),

where m indicates a base with 2′O-Methyl modification, * indicates a phosphorothioate bond, and N’s indicate the residues of the targeting domain, e.g., as described herein, (optionally with an inverted abasic residue at the 5′ and/or 3′ terminus).

[0290] In an embodiment, the gRNA is a sgRNA and comprises, e.g., consists of:

mN*mN*mN*NNNNNNNNNNNNNNNNNGUUUUAGAGCUAGAAAUAGCAAGU
UAAAAUAAGGCUAGUCCGUUAUCAACUUGAAAAAGUGGCACCGAGUCGGU
GCU*mU*mU*mU(SEQ ID NO: 3183),

where m indicates a base with 2′O-Methyl modification, * indicates a phosphorothioate bond, and N’s indicate the residues of the targeting domain, e.g., as described herein, (optionally with an inverted abasic residue at the 5′ and/or 3′ terminus).

[0291] In an embodiment, the gRNA is a sgRNA and comprises, e.g., consists of:

mN*mN*mN*NNNNNNNNNNNNNNNNNGUUUUAGAGCUAGAAAUAGCAAGU
UAAAAUAAGGCUAGUCCGUUAUCAACUUGAAAAAGUGGCACCGAGUCGGU
GCmU*mU*mU*U(SEQ ID NO: 3184),

where m indicates a base with 2′O-Methyl modification, * indicates a phosphorothioate bond, and N’s indicate the residues of the targeting domain, e.g., as described herein, (optionally with an inverted abasic residue at the 5′ and/or 3′ terminus).

### 6) First Tracr Extension

[0292] Where the gRNA comprises a first flagpole extension, the tracr may comprise a first tracr extension. The first tracr extension may comprise nucleotides that are complementary, e.g., 80%, 85%, 90%, 95% or 99%, e.g., fully complementary, with nucleotides of the first flagpole extension. In some aspects, the first tracr extension nucleotides that hybridize with complementary nucleotides of the first flagpole extension are contiguous. In some aspects, the first tracr extension nucleotides that hybridize with complementary nucleotides of the first flagpole extension are discontinuous, e.g., comprises two or more regions of hybridization separated by nucleotides that do not base pair with nucleotides of the first flagpole extension. In some aspects, the first tracr extension comprises at least 2, 3, 4, 5, 6, 7, 8, 9, 10, 11, 12, 13, 14, 15, 16, 17, 18, 19, 20 or more nucleotides. In some aspects, the first tracr extension comprises SEQ ID NO: 3117. In some aspects the first tracr extension comprises nucleic acid that is at least 80%, 85%, 90%, 95% or 99% homology to SEQ ID NO: 3117.

[0293] Some or all of the nucleotides of the first tracr extension can have a modification, e.g., modification found in Section XIII herein.

[0294] In some embodiments, the sgRNA may comprise, from 5′ to 3′, disposed 3′ to the targeting domain:
[0295] a)

GUUUUAGAGCUAGAAAUAGCAAGUUAAAAUAAGGCUAGUCCGUUAUCAAC
UUGAAAAAGUGGCACCGAGUCGGUGC (SEQ ID NO: 3123);

[0296] b)

GUUUAAGAGCUAGAAAUAGCAAGUUUAAAUAAGGCUAGUCCGUUAUCAAC
UUGAAAAAGUGGCACCGAGUCGGUGC (SEQ ID NO: 3124);

[0297] c)

GUUUUAGAGCUAUGCUGGAAACAGCAUAGCAAGUUAAAAUAAGGCUAGUC
CGUUAUCAACUUGAAAAAGUGGCACCGAGUCGGUGC (SEQ ID NO: 3
125);

[0298] d)

GUUUAAGAGCUAUGCUGGAAACAGCAUAGCAAGUUUAAAUAAGGCUAGUC
CGUUAUCAACUUGAAAAAGUGGCACCGAGUCGGUGC (SEQ ID NO: 3
126);

[0299] e) any of a) to d), above, further comprising, at the 3′ end, at least 1, 2, 3, 4, 5, 6 or 7 uracil (U) nucleotides, e.g., 1, 2, 3, 4, 5, 6, or 7 uracil (U) nucleotides;
[0300] f) any of a) to d), above, further comprising, at the 3′ end, at least 1, 2, 3, 4, 5, 6 or 7 adenine (A) nucleotides, e.g., 1, 2, 3, 4, 5, 6, or 7 adenine (A) nucleotides; or
[0301] g) any of a) to f), above, further comprising, at the 5′ end (e.g., at the 5′ terminus, e.g., 5′ to the targeting domain), at least 1, 2, 3, 4, 5, 6 or 7 adenine (A) nucleotides, e.g., 1, 2, 3, 4, 5, 6, or 7 adenine (A) nucleotides. In embodiments, any of a) to g) above is disposed directly 3′ to the targeting domain.

[0302] In an embodiment, a sgRNA of the invention comprises, e.g., consists of, from 5′ to 3′: [targeting domain] -

GUUUUAGAGCUAGAAAUAGCAAGUUAAAAUAAGGCUAGUCCGUUAUCAAC
UUGAAAAAGUGGCACCGAGUCGGUGCUUUU (SEQ ID NO: 3159).

[0303] In an embodiment, a sgRNA of the invention comprises, e.g., consists of, from 5′ to 3′: [targeting domain] -

GUUUAAGAGCUAUGCUGGAAACAGCAUAGCAAGUUUAAAUAAGGCUAGUC
CGUUAUCAACUUGAAAAAGUGGCACCGAGUCGGUGCUUUU (SEQ ID N
O: 3155).

[0304] In some embodiments, the dgRNA may comprise:

[0305] A crRNA comprising, from 5′ to 3′, preferrably disposed directly 3′ to the targeting domain:
[0306] a)

GUUUUAGAGCUA (SEQ ID NO: 3110);

[0307] b)

GUUUAAGAGCUA (SEQ ID NO: 3111);

[0308] c)

GUUUUAGAGCUAUGCUG (SEQ ID NO: 3127);

[0309] d)

GUUUAAGAGCUAUGCUG (SEQ ID NO: 3128);

[0310] e)

GUUUUAGAGCUAUGCUGUUUUG (SEQ ID NO: 3129);

[0311] f)

GUUUAAGAGCUAUGCUGUUUUG (SEQ ID NO: 3130);

or
[0312] g)

GUUUUAGAGCUAUGCU (SEQ ID NO: 3154):

and a tracr comprising, from 5′ to 3′:
[0313] a)

UAGCAAGUUAAAAUAAGGCUAGUCCGUUAUCAACUUGAAAAAGUGGCACC
GAGUCGGUGC (SEQ ID NO: 3115);

[0314] b)

UAGCAAGUUUAAAUAAGGCUAGUCCGUUAUCAACUUGAAAAAGUGGCACC
GAGUCGGUGC (SEQ ID NO: 3116);

[0315] c)

CAGCAUAGCAAGUUAAAAUAAGGCUAGUCCGUUAUCAACUUGAAAAAGUG
GCACCGAGUCGGUGC (SEQ ID NO: 3131);

[0316] d)

CAGCAUAGCAAGUUUAAAUAAGGCUAGUCCGUUAUCAACUUGAAAAAGUG
GCACCGAGUCGGUGC (SEQ ID NO: 3200);

[0317] e)

AACAGCAUAGCAAGUUAAAAUAAGGCUAGUCCGUUAUCAACUUGAAAAAG
UGGCACCGAGUCGGUGCUUUUUUU (SEQ ID NO: 3152);

[0318] f)

AACAGCAUAGCAAGUUUAAAUAAGGCUAGUCCGUUAUCAACUUGAAAAAG
UGGCACCGAGUCGGUGCUUUUUUU (SEQ ID NO: 3153);

[0319] g)

AACAGCAUAGCAAGUUAAAAUAAGGCUAGUCCGUUAUCAACUUGAAAAAG
UGGCACCGAGUCGGUGC (SEQ ID NO: 3160)

[0320] h)

GUUUAAGAGCUAUGCUGGAAACAGCAUAGCAAGUUUAAAUAAGGCUAGUC
CGUUAUCAACUUGAAAAAGUGGCACCGAGUCGGUGCUUUU (SEQ ID N
O: 3155);

[0321] i)

AGCAUAGCAAGUUAAAAUAAGGCUAGUCCGUUAUCAACUUGAAAAAGUGG
CACCGAGUCGGUGCUUU (SEQ ID NO: 3156);

[0322] j)

GUUGGAACCAUUCAAAACAGCAUAGCAAGUUAAAAUAAGGCUAGUCCGUU
AUCAACUUGAAAAAGUGGCACCGAGUCGGUGCUUU (SEQ ID NO: 31
57);

[0323] k) any of a) to j), above, further comprising, at the 3′ end, at least 1, 2, 3, 4, 5, 6 or 7 uracil (U) nucleotides, e.g., 1, 2, 3, 4, 5, 6, or 7 uracil (U) nucleotides;
[0324] l) any of a) to j), above, further comprising, at the 3′ end, at least 1, 2, 3, 4, 5, 6 or 7 adenine (A) nucleotides, e.g., 1, 2, 3, 4, 5, 6, or 7 adenine (A) nucleotides; or
[0325] m) any of a) to 1), above, further comprising, at the 5′ end (e.g., at the 5′ terminus), at least 1, 2, 3, 4, 5, 6 or 7 adenine (A) nucleotides, e.g., 1, 2, 3, 4, 5, 6, or 7 adenine (A) nucleotides.

[0326] In an embodiment, the sequence of k), above comprises the 3′ sequence UUUUUU, e.g., if a U6 promoter is used for transcription. In an embodiment, the sequence of k), above, comprises the 3′ sequence UUUU, e.g., if an HI promoter is used for transcription. In an embodiment, sequence of k), above, comprises variable numbers of 3′ U’s depending, e.g., on the termination signal of the pol-III promoter used. In an embodiment, the sequence of k), above, comprises variable 3′ sequence derived from the DNA template if a T7 promoter is used. In an embodiment, the sequence of k), above, comprises variable 3′ sequence derived from the DNA template, e.g., if in vitro transcription is used to generate the RNA molecule. In an embodiment, the sequence of k), above, comprises variable 3′ sequence derived from the DNA template, e.g, if a pol-II promoter is used to drive transcription.

[0327] In an embodiment, the crRNA comprises, e.g., consists of, a targeting domain and, disposed 3′ to the targeting domain (e.g., disposed directly 3′ to the targeting domain), a sequence comprising, e.g., consisting of, SEQ ID NO: 3129, and the tracr comprises, e.g., consists of

AACAGCAUAGCAAGUUAAAAUAAGGCUAGUCCGUUAUCAACUUGAAAAAG
UGGCACCGAGUCGGUGCUUUUUUU (SEQ ID NO: 3152).

[0328] In an embodiment, the crRNA comprises, e.g., consists of, a targeting domain and, disposed 3′ to the targeting domain (e.g., disposed directly 3′ to the targeting domain), a sequence comprising, e.g., consisting of, SEQ ID NO: 3130, and the tracr comprises, e.g., consists of,

AACAGCAUAGCAAGUUUAAAUAAGGCUAGUCCGUUAUCAACUUGAAAAAG
UGGCACCGAGUCGGUGCUUUUUUU (SEQ ID NO: 3153).

[0329] In an embodiment, the crRNA comprises, e.g., consists of, a targeting domain and, disposed 3′ to the targeting domain (e.g., disposed directly 3′ to the targeting domain), a sequence comprising, e.g., consisting of,

GUUUUAGAGCUAUGCU (SEQ ID NO: 3154),

and the tracr comprises, e.g., consistsof,

GUUUAAGAGCUAUGCUGGAAACAGCAUAGCAAGUUUAAAUAAGGCUAGUC
CGUUAUCAACUUGAAAAAGUGGCACCGAGUCGGUGCUUUU (SEQ ID N
O: 3155).

[0330] In an embodiment, the crRNA comprises, e.g., consists of, a targeting domain and, disposed 3′ to the targeting domain (e.g., disposed directly 3′ to the targeting domain), a sequence comprising, e.g., consisting of,

GUUUUAGAGCUAUGCU (SEQ ID NO: 3154),

and the tracr comprises, e.g., consists of,

AGCAUAGCAAGUUAAAAUAAGGCUAGUCCGUUAUCAACUUGAAAAAGUGG
CACCGAGUCGGUGCUUU (SEQ ID NO: 3156).

[0331] In an embodiment, the crRNA comprises, e.g., consists of, a targeting domain and, disposed 3′ to the targeting domain (e.g., disposed directly 3′ to the targeting domain), a sequence comprising, e.g., consisting of,

GUUUUAGAGCUAUGCUGUUUUG (SEQ ID NO: 3129),

and the tracr comprises, e.g., consists of,

GUUGGAACCAUUCAAAACAGCAUAGCAAGUUAAAAUAAGGCUAGUCCGUU
AUCAACUUGAAAAAGUGGCACCGAGUCGGUGCUUU (SEQ ID NO: 31
57).

### II. gRNA Targeting Domains Directed to WIZ Gene

[0332] Provided in the Table 1-Table 3 (at the end of the document) are targeting domains directed to WIZ gene regions, for gRNA molecules of the present invention, and for use in the various aspects of the present invention, for example, in altering expression of globin genes, for example, a fetal hemoglobin gene or a hemoglobin beta gene.

### III. Methods for Designing gRNAs

[0333] Methods for designing gRNAs are described herein, including methods for selecting, designing and validating target sequences. Exemplary targeting domains are also provided herein. Targeting Domains discussed herein can be incorporated into the gRNAs described herein.

[0334] Methods for selection and validation of target sequences as well as off-target analyses are described, e.g., in. Mali el al., 2013 SCIENCE 339(6121): 823-826; Hsu et al, 2013 NAT BIOTECHNOL, 31 (9): 827-32; Fu et al, 2014 NAT BIOTECHNOL, doi: 10.1038/nbt.2808. PubMed PM ID: 24463574; Heigwer et al, 2014 NAT METHODS 11 (2): 122-3. doi: 10.1038/nmeth.2812. PubMed PMID: 24481216; Bae el al, 2014 BIOINFORMATICS PubMed PMID: 24463181 ; Xiao A el al, 2014 BIOINFORMATICS PubMed PMID: 24389662.

[0335] For example, a software tool can be used to optimize the choice of gRNA within a user’s target sequence, e.g., to minimize total off-target activity across the genome. Off target activity may be other than cleavage. For each possible gRNA choice e.g., using S.pyogenes Cas9, the tool can identify all off-target sequences (e.g., preceding either NAG or NGG PAMs) across the genome that contain up to certain number (e.g., 1, 2, 3, 4, 5, 6, 7, 8, 9, or 10) of mismatched base-pairs. The cleavage efficiency at each off-target sequence can be predicted, e.g., using an experimentally-derived weighting scheme. Each possible gRNA is then ranked according to its total predicted off-target cleavage; the top-ranked gRNAs represent those that are likely to have the greatest on-target and the least off-target cleavage. Other functions, e.g., automated reagent design for CRISPR construction, primer design for the on-target Surveyor assay, and primer design for high-throughput detection and quantification of off-target cleavage via next-gen sequencing, can also be included in the tool. Candidate gRNA molecules can be evaluated by art-known methods or as described herein.

[0336] Although software algorithms may be used to generate an initial list of potential gRNA molecules, cutting efficiency and specificity will not necessarily reflect the predicted values, and gRNA molecules typically require screening in specific cell lines, e.g., primary human cell lines, e.g., human HSPCs, e.g., human CD34+ cells, to determine, for example, cutting efficiency, indel formation, cutting specificity and change in desired phenotype. These properties may be assayed by the methods described herein.

### IV. Cas Molecules

### Cas9 Molecules

[0337] In preferred embodiments, the Cas molecule is a Cas9 molecule. Cas9 molecules of a variety of species can be used in the methods and compositions described herein. While the S.pyogenes Cas9 molecule are the subject of much of the disclosure herein, Cas9 molecules of, derived from, or based on the Cas9 proteins of other species listed herein can be used as well. In other words, other Cas9 molecules, e.g., S.thermophilus, Staphylococcus aureus and/or Neisseria meningitidis Cas9 molecules, may be used in the systems, methods and compositions described herein. Additional Cas9 species include: Acidovorax avenae, Actinobacillus pleuropneumoniae, Actinobacillus succinogenes, Actinobacillus suis, Actinomyces sp., cycliphilus denitrificans, Aminomonas paucivorans, Bacillus cereus, Bacillus smithii, Bacillus thuringiensis, Bacteroides sp., Blastopirellula marina, Bradyrhiz′ obium sp., Brevibacillus latemsporus, Campylobacter coli, Campylobacter jejuni, Campylobacter lad, Candidatus Puniceispirillum, Clostridiu cellulolyticum, Clostridium perfringens, Corynebacterium accolens, Corynebacterium diphtheria, Corynebacterium matruchotii, Dinoroseobacter sliibae, Eubacterium dolichum, gamma proteobacterium, Gluconacetobacler diazotrophicus, Haemophilus parainfluenzae, Haemophilus sputorum, Helicobacter canadensis, Helicobacter cinaedi, Helicobacter mustelae, Ilyobacler polytropus, Kingella kingae, Lactobacillus crispatus, Listeria ivanovii, Listeria monocytogenes, Listeriaceae bacterium, Methylocystis sp., Methylosinus trichosporium, Mobiluncus mulieris, Neisseria bacilliformis, Neisseria cinerea, Neisseria flavescens, Neisseria lactamica. Neisseria sp., Neisseria wadsworthii, Nitrosomonas sp., Parvibaculum lavamentivorans, Pasteurella multocida, Phascolarctobacterium succinatutens, Ralstonia syzygii, Rhodopseudomonas palustris, Rhodovulum sp., Simonsiella muelleri, Sphingomonas sp., Sporolactobacillus vineae, Staphylococcus lugdunensis, Streptococcus sp., Subdoligranulum sp., Tislrella mobilis, Treponema sp., or Verminephrobacter eiseniae.

[0338] A Cas9 molecule, as that term is used herein, refers to a molecule that can interact with a gRNA molecule (e.g., sequence of a domain of a tracr) and, in concert with the gRNA molecule, localize (e.g., target or home) to a site which comprises a target sequence and PAM sequence.

[0339] In an embodiment, the Cas9 molecule is capable of cleaving a target nucleic acid molecule, which may be referred to herein as an active Cas9 molecule. In an embodiment, an active Cas9 molecule, comprises one or more of the following activities: a nickase activity, i.e., the ability to cleave a single strand, e.g., the non-complementary strand or the complementary strand, of a nucleic acid molecule; a double stranded nuclease activity, i.e., the ability to cleave both strands of a double stranded nucleic acid and create a double stranded break, which in an embodiment is the presence of two nickase activities; an endonuclease activity; an exonuclease activity; and a helicase activity, i.e., the ability to unwind the helical structure of a double stranded nucleic acid.

[0340] In an embodiment, an enzymatically active Cas9 molecule cleaves both DNA strands and results in a double stranded break. In an embodiment, a Cas9 molecule cleaves only one strand, e.g., the strand to which the gRNA hybridizes to, or the strand complementary to the strand the gRNA hybridizes with. In an embodiment, an active Cas9 molecule comprises cleavage activity associated with an HNH-like domain. In an embodiment, an active Cas9 molecule comprises cleavage activity associated with an N-terminal RuvC-like domain. In an embodiment, an active Cas9 molecule comprises cleavage activity associated with an HNH-like domain and cleavage activity associated with an N-terminal RuvC-like domain. In an embodiment, an active Cas9 molecule comprises an active, or cleavage competent, HNH-like domain and an inactive, or cleavage incompetent, N-terminal RuvC-like domain. In an embodiment, an active Cas9 molecule comprises an inactive, or cleavage incompetent, HNH-like domain and an active, or cleavage competent, N-terminal RuvC-like domain.

[0341] In an embodiment, the ability of an active Cas9 molecule to interact with and cleave a target nucleic acid is PAM sequence dependent. A PAM sequence is a sequence in the target nucleic acid. In an embodiment, cleavage of the target nucleic acid occurs upstream from the PAM sequence. Active Cas9 molecules from different bacterial species can recognize different sequence motifs (e.g., PAM sequences). In an embodiment, an active Cas9 molecule of S.pyogenes recognizes the sequence motif NGG and directs cleavage of a target nucleic acid sequence 1 to 10, e.g., 3 to 5, base pairs upstream from that sequence. See, e.g., Mali el ai, SCIENCE 2013; 339(6121): 823- 826. In an embodiment, an active Cas9 molecule of S. thermophilus recognizes the sequence motif NGGNG and NNAG AAW (W = A or T) and directs cleavage of a core target nucleic acid sequence 1 to 10, e.g., 3 to 5, base pairs upstream from these sequences. See, e.g., Horvath et al., SCIENCE 2010; 327(5962): 167- 170, and Deveau et al, J BACTERIOL 2008; 190(4): 1390- 1400. In an embodiment, an active Cas9 molecule of S. mulans recognizes the sequence motif NGG or NAAR (R - A or G) and directs cleavage of a core target nucleic acid sequence 1 to 10, e.g., 3 to 5 base pairs, upstream from this sequence. See, e.g., Deveau et al., J BACTERIOL 2008; 190(4): 1 390- 1400.

[0342] In an embodiment, an active Cas9 molecule of S. aureus recognizes the sequence motif NNGRR (R = A or G) and directs cleavage of a target nucleic acid sequence 1 to 10, e.g., 3 to 5, base pairs upstream from that sequence. See, e.g., Ran F. et al., NATURE, vol. 520, 2015, pp. 186-191. In an embodiment, an active Cas9 molecule of N. meningitidis recognizes the sequence motif NNNNGATT and directs cleavage of a target nucleic acid sequence 1 to 10, e.g., 3 to 5, base pairs upstream from that sequence. See, e.g., Hou et al., PNAS EARLY EDITION 2013, 1 -6. The ability of a Cas9 molecule to recognize a PAM sequence can be determined, e.g., using a transformation assay described in Jinek et al, SCIENCE 2012, 337:816.

[0343] Some Cas9 molecules have the ability to interact with a gRNA molecule, and in conjunction with the gRNA molecule home (e.g., targeted or localized) to a core target domain, but are incapable of cleaving the target nucleic acid, or incapable of cleaving at efficient rates. Cas9 molecules having no, or no substantial, cleavage activity may be referred to herein as an inactive Cas9 (an enzymatically inactive Cas9), a dead Cas9, or a dCas9 molecule. For example, an inactive Cas9 molecule can lack cleavage activity or have substantially less, e.g., less than 20, 10, 5, 1 or 0.1% of the cleavage activity of a reference Cas9 molecule, as measured by an assay described herein.

[0344] Exemplary naturally occurring Cas9 molecules are described in Chylinski et al, RNA Biology 2013; 10:5, 727-737. Such Cas9 molecules include Cas9 molecules of a cluster 1 bacterial family, cluster 2 bacterial family, cluster 3 bacterial family, cluster 4 bacterial family, cluster 5 bacterial family, cluster 6 bacterial family, a cluster 7 bacterial family, a cluster 8 bacterial family, a cluster 9 bacterial family, a cluster 10 bacterial family, a cluster 1 1 bacterial family, a cluster 12 bacterial family, a cluster 13 bacterial family, a cluster 14 bacterial family, a cluster 1 bacterial family, a cluster 16 bacterial family, a cluster 17 bacterial family, a cluster 1 8 bacterial family, a cluster 19 bacterial family, a cluster 20 bacterial family, a cluster 21 bacterial family, a cluster 22 bacterial family, a cluster 23 bacterial family, a cluster 24 bacterial family, a cluster 25 bacterial family, a cluster 26 bacterial family, a cluster 27 bacterial family, a cluster 28 bacterial family, a cluster 29 bacterial family, a cluster 30 bacterial family, a cluster 31 bacterial family, a cluster 32 bacterial family, a cluster 33 bacterial family, a cluster 34 bacterial family, a cluster 35 bacterial family, a cluster 36 bacterial family, a cluster 37 bacterial family, a cluster 38 bacterial family, a cluster 39 bacterial family, a cluster 40 bacterial family, a cluster 41 bacterial family, a cluster 42 bacterial family, a cluster 43 bacterial family, a cluster 44 bacterial family, a cluster 45 bacterial family, a cluster 46 bacterial family, a cluster 47 bacterial family, a cluster 48 bacterial family,. a cluster 49 bacterial family, a cluster 50 bacterial family, a cluster 5 1 bacterial family, a cluster 52 bacterial family, a cluster 53 bacterial family, a cluster 54 bacterial family, a cluster 55 bacterial family, a cluster 56 bacterial family, a cluster 57 bacterial family, a cluster 58 bacterial family, a cluster 59 bacterial family, a cluster 60 bacterial family, a cluster 61 bacterial family, a cluster 62 bacterial family, a cluster 63 bacterial family, a cluster 64 bacterial family, a cluster 65 bacterial family, a cluster 66 bacterial family, a cluster 67 bacterial family, a cluster 68 bacterial family, a cluster 69 bacterial family, a cluster 70 bacterial family, a cluster 71 bacterial family, a cluster 72 bacterial family, a cluster 73 bacterial family, a cluster 74 bacterial family, a cluster 75 bacterial family, a cluster 76 bacterial family, a cluster 77 bacterial family, or a cluster 78 bacterial family.

[0345] Exemplary naturally occurring Cas9 molecules include a Cas9 molecule of a cluster 1 bacterial family. Examples include a Cas9 molecule of: S.pyogenes (e.g., strain SF370, MGAS 10270, MGAS 10750, MGAS2096, MGAS315, MGAS5005, MGAS6180, MGAS9429, NZ131 and SSI- 1), S.thermophilus (e.g., strain LMD-9), S.pseudoporcinus (e.g., strain SPIN 20026), S.mutans (e.g., strain UA 159, NN2025), S.macacae (e.g., strain NCTC1 1558), S.gallolylicus (e.g., strain UCN34, ATCC BAA-2069), S.equines (e.g., strain ATCC 9812, MGCS 124), S.dysdalactiae (e.g., strain GGS 124), S. bovis (e.g., strain ATCC 700338), S.cmginosus (e.g.; strain F021 1 ), S.agalactia (e.g., strain NEM316, A909), Listeriamonocytogenes (e.g., strain F6854), Listeriainnocua (L. innocua, e.g., strain Clip 1 1262), Enterococcusitalicus (e.g., strain DSM 15952), or Enterococcusfaecium (e.g., strain 1,231, 408). Additional exemplary Cas9 molecules are a Cas9 molecule of Neisseriameningitidis (Hou et′al. PNAS Early Edition 2013, 1 -6) and a S.aureus Cas9 molecule.

[0346] In an embodiment, a Cas9 molecule, e.g., an active Cas9 molecule or inactive Cas9 molecule, comprises an amino acid sequence: having 60%, 65%, 70%, 75%, 80%, 85%, 90%, 95%, 96%, 97%, 98%, or 99% homology with; differs at no more than 1%, 2%, 5%, 10%, 15%, 20%, 30%, or 40% of the amino acid residues when compared with; differs by at least 1, 2, 5, 10 or 20 amino acids but by no more than 100, 80, 70, 60, 50, 40 or 30 amino acids from; or is identical to; any Cas9 molecule sequence described herein or a naturally occurring Cas9 molecule sequence, e.g., a Cas9 molecule from a species listed herein or described in Chylinski et al., RNA Biology 2013, 10:5, ′I2′I-T,1 Hou et al. PNAS Early Edition 2013, 1-6.

[0347] In an embodiment, a Cas9 molecule comprises an amino acid sequence having 60%, 65%, 70%, 75%, 80%, 85%, 90%, 95%, 96%, 97%, 98%, or 99% homology with; differs at no more than 1%, 2%, 5%, 10%, 15%, 20%, 30%, or 40% of the amino acid residues when compared with; differs by at least 1, 2, 5, 10 or 20 amino acids but by no more than 100, 80, 70, 60, 50, 40 or 30 amino acids from; or is identical to; S.pyogenes Cas9 (NCBI Reference Sequence: WP_010922251.1; SEQ ID NO: 3133).

[0348] In embodiments, the Cas9 molecule is a S.pyogenes Cas9 variant of SEQ ID NO: 3133 that includes one or more mutations to positively charged amino acids (e.g., lysine, arginine or histidine) that introduce an uncharged or nonpolar amino acid, e.g., alanine, at said position. In embodiments, the mutation is to one or more positively charged amino acids in the nt-groove of Cas9. In embodiments, the Cas9 molecule is a S.pyogenes Cas9 variant of SEQ ID NO: 3133 that includes a mutatation at position 855 of SEQ ID NO: 3133, for example a mutation to an uncharged amino acid, e.g., alanine, at position 855 of SEQ ID NO: 3133. In embodiments, the Cas9 molecule has a mutation only at position 855 of SEQ ID NO: 3133, relative to SEQ ID NO: 3133, e.g., to an uncharged amino acid, e.g., alanine. In embodiments, the Cas9 molecule is a S.pyogenes Cas9 variant of SEQ ID NO: 3133 that includes a mutatation at position 810, a mutation at position 1003, and/or a mutation at position 1060 of SEQ ID NO: 3133, for example a mutation to alanine at position 810, position 1003, and/or position 1060 of SEQ ID NO: 3133. In embodiments, the Cas9 molecule has a mutation only at position 810, position 1003, and position 1060 of SEQ ID NO: 3133, relative to SEQ ID NO: 3133, e.g., where each mutation is to an uncharged amino acid, for example, alanine. In embodiments, the Cas9 molecule is a S.pyogenes Cas9 variant of SEQ ID NO: 3133 that includes a mutatation at position 848, a mutation at position 1003, and/or a mutation at position 1060 of SEQ ID NO: 3133, for example a mutation to alanine at position 848, position 1003, and/or position 1060 of SEQ ID NO: 3133. In embodiments, the Cas9 molecule has a mutation only at position 848, position 1003, and position 1060 of SEQ ID NO: 3133, relative to SEQ ID NO: 3133, e.g., where each mutation is to an uncharged amino acid, for example, alanine. In embodiments, the Cas9 molecule is a Cas9 molecule as described in Slaymaker et al., Science Express, available online Dec. 1, 2015 at Science DOI: 10.1126/science.aad5227.

[0349] In embodiments, the Cas9 molecule is a S.pyogenes Cas9 variant of SEQ ID NO: 3133 that includes one or more mutations. In embodiments, the Cas9 variant comprises a mutation at position 80 of SEQ ID NO: 3133, e.g., includes a leucine at position 80 of SEQ ID NO: 3133 (i.e., comprises, e.g., consists of, SEQ ID NO: 3133 with a C80L mutation). In embodiments, the Cas9 variant comprises a mutation at position 574 of SEQ ID NO: 3133, e.g., includes a glutamic acid at position 574 of SEQ ID NO: 3133 (i.e., comprises, e.g., consists of, SEQ ID NO: 3133 with a C574E mutation). In embodiments, the Cas9 variant comprises a mutation at position 80 and a mutation at position 574 of SEQ ID NO: 3133, e.g., includes a leucine at position 80 of SEQ ID NO: 3133, and a glutamic acid at position 574 of SEQ ID NO: 3133 (i.e., comprises, e.g., consists of, SEQ ID NO: 3133 with a C80L mutation and a C574E mutation). Without being bound by theory, it is believed that such mutations improve the solution properties of the Cas9 molecule.

[0350] In embodiments, the Cas9 molecule is a S.pyogenes Cas9 variant of SEQ ID NO: 3133 that includes one or more mutations. In embodiments, the Cas9 variant comprises a mutation at position 147 of SEQ ID NO: 3133, e.g., includes a tyrosine at position 147 of SEQ ID NO: 3133 (i.e., comprises, e.g., consists of, SEQ ID NO: 3133 with a D147Y mutation). In embodiments, the Cas9 variant comprises a mutation at position 411 of SEQ ID NO: 3133, e.g., includes a threonine at position 411 of SEQ ID NO: 3133 (i.e., comprises, e.g., consists of, SEQ ID NO: 3133 with a P411T mutation). In embodiments, the Cas9 variant comprises a mutation at position 147 and a mutation at position 411 of SEQ ID NO: 3133, e.g., includes a tyrosine at position 147 of SEQ ID NO: 3133, and a threonine at position 411 of SEQ ID NO: 3133 (i.e., comprises, e.g., consists of, SEQ ID NO: 3133 with a D147Y mutation and a P411T mutation). Without being bound by theory, it is believed that such mutations improve the targeting efficiency of the Cas9 molecule, e.g., in yeast.

[0351] In embodiments, the Cas9 molecule is a S.pyogenes Cas9 variant of SEQ ID NO: 3133 that includes one or more mutations. In embodiments, the Cas9 variant comprises a mutation at position 1135 of SEQ ID NO: 3133, e.g., includes a glutamic acid at position 1135 of SEQ ID NO: 3133 (i.e., comprises, e.g., consists of, SEQ ID NO: 3133 with a D1135E mutation). Without being bound by theory, it is believed that such mutations improve the selectivity of the Cas9 molecule for the NGG PAM sequence versus the NAG PAM sequence.

[0352] In embodiments, the Cas9 molecule is a S.pyogenes Cas9 variant of SEQ ID NO: 3133 that includes one or more mutations that introduce an uncharged or nonpolar amino acid, e.g., alanine, at certain positions. In embodiments, the Cas9 molecule is a S.pyogenes Cas9 variant of SEQ ID NO: 3133 that includes a mutatation at position 497, a mutation at position 661, a mutation at position 695 and/or a mutation at position 926 of SEQ ID NO: 3133, for example a mutation to alanine at position 497, position 661, position 695 and/or position 926 of SEQ ID NO: 3133. In embodiments, the Cas9 molecule has a mutation only at position 497, position 661, position 695, and position 926 of SEQ ID NO: 3133, relative to SEQ ID NO: 3133, e.g., where each mutation is to an uncharged amino acid, for example, alanine. Without being bound by theory, it is believed that such mutations reduce the cutting by the Cas9 molecule at off-target sites

[0353] It will be understood that the mutations described herein to the Cas9 molecule may be combined, and may be combined with any of the fusions or other modifications described herein, and the Cas9 molecule tested in the assays described herein.

[0354] Various types of Cas molecules can be used to practice the inventions disclosed herein. In some embodiments, Cas molecules of Type II Cas systems are used. In other embodiments, Cas molecules of other Cas systems are used. For example, Type I or Type III Cas molecules may be used. Exemplary Cas molecules (and Cas systems) are described, e.g., in Haft et ai, PLoS COMPUTATIONAL BIOLOGY 2005, 1(6): e60 and Makarova et al, NATURE REVIEW MICROBIOLOGY 201 1, 9:467-477, the contents of both references are incorporated herein by reference in their entirety.

[0355] In an embodiment, the Cas9 molecule comprises one or more of the following activities: a nickase activity; a double stranded cleavage activity (e.g., an endonuclease and/or exonuclease activity); a helicase activity; or the′ ability, together with a gRNA molecule, to localize to a target nucleic acid.

### Altered Cas9 Molecules

[0356] Naturally occurring Cas9 molecules possess a number of properties, including: nickase activity, nuclease activity (e.g., endonuclease and/or exonuclease activity); helicase activity; the ability to associate functionally with a gRNA molecule; and the ability to target (or localize to) a site on a nucleic acid (e.g., PAM recognition and specificity). In an embodiment, a Cas9 molecules can include all or a subset of these properties. In typical embodiments, Cas9 molecules have the ability to interact with a gRNA molecule and, in concert with the gRNA molecule, localize to a site in a nucleic acid. Other activities, e.g., PAM specificity, cleavage activity, or helicase activity can vary more widely in Cas9 molecules.

[0357] Cas9 molecules with desired properties can be made in a number of ways, e.g., by alteration of a parental, e.g., naturally occurring Cas9 molecules to provide an altered Cas9 molecule having a desired property. For example, one or more mutations or differences relative to a parental Cas9 molecule can be introduced. Such mutations and differences comprise: substitutions (e.g., conservative substitutions or substitutions of non-essential amino acids); insertions; or deletions. In an embodiment, a Cas9 molecule can comprises one or more mutations or differences, e.g., at least 1, 2, 3, 4, 5, 10, 15, 20, 30, 40 or 50 mutations but less than 200, 100, or 80 mutations relative to a reference Cas9 molecule.

[0358] In an embodiment, a mutation or mutations do not have a substantial effect on a Cas9 activity, e.g. a Cas9 activity described herein. In an embodiment, a mutation or mutations have a substantial effect on a Cas9 activity, e.g. a Cas9 activity described herein. In an embodiment, exemplary activities comprise one or more of PAM specificity, cleavage activity, and helicase activity. A mutation(s) can be present, e.g., in: one or more RuvC-like domain, e.g., an N— terminal RuvC-like domain; an HNH-like domain; a region outside the RuvC-like domains and the HNH-like domain. In some embodiments, a mutation(s) is present in an N-terminal RuvC— like domain. In some embodiments, a mutation(s) is present in an HNH-like domain. In some embodiments, mutations are present in both an N-terminal RuvC-like domain and an HNH-like domain.

[0359] Whether or not a particular sequence, e.g., a substitution, may affect one or more activity, such as targeting activity, cleavage activity, etc, can be evaluated or predicted, e.g., by evaluating whether the mutation is conservative or by the method described in Section III. In an embodiment, a “non-essential” amino acid residue, as used in the context of a Cas9 molecule, is a residue that can be altered from the wild-type sequence of a Cas9 molecule, e.g., a naturally occurring Cas9 molecule, e.g., an active Cas9 molecule, without abolishing or more preferably, without substantially altering a Cas9 activity (e.g., cleavage activity), whereas changing an “essential” amino acid residue results in a substantial loss of activity (e.g., cleavage activity).

### Cas9 Molecules with Altered PAM Recognition or No PAM Recognition

[0360] Naturally occurring Cas9 molecules can recognize specific PAM sequences, for example the PAM recognition sequences described above for S.pyogenes, S.thermophilus, S.mutans, S.aureus and N.meningitidis.

[0361] In an embodiment, a Cas9 molecule has the same PAM specificities as a naturally occurring Cas9 molecule. In other embodiments, a Cas9 molecule has a PAM specificity not associated with a naturally occurring Cas9 molecule, or a PAM specificity not associated with the naturally occurring Cas9 molecule to which it has the closest sequence homology. For example, a naturally occurring Cas9 molecule can be altered, e.g., to alter PAM recognition, e.g., to alter the PAM sequence that the Cas9 molecule recognizes to decrease off target sites and/or improve specificity; or eliminate a PAM recognition requirement. In an embodiment, a Cas9 molecule can be altered, e.g., to increase length of PAM recognition sequence and/or improve Cas9 specificity to high level of identity to decrease off target sites and increase specificity. In an embodiment, the length of the PAM recognition sequence is at least 4, 5, 6, 7, 8, 9, 10 or 15 amino acids in length. Cas9 molecules that recognize different PAM sequences and/or have reduced off- target activity can be generated using directed evolution. Exemplary methods and systems that can be used for directed evolution of Cas9 molecules are described, e.g., in Esvelt el al, Nature 2011, 472(7344): 499-503. Candidate Cas9 molecules can be evaluated, e.g., by methods described herein.

### Non-Cleaving and Modified-Cleavage Cas9 Molecules

[0362] In an embodiment, a Cas9 molecule comprises a cleavage property that differs from naturally occurring Cas9 molecules, e.g., that differs from the naturally occurring Cas9 molecule having the closest homology. For example, a Cas9 molecule can differ from naturally occurring Cas9 molecules, e.g., a Cas9 molecule of S.pyogenes, as follows: its ability to modulate, e.g., decreased or increased, cleavage of a double stranded break (endonuclease and/or exonuclease activity), e.g., as compared to a naturally occurring Cas9 molecule (e.g., a Cas9 molecule of S.pyogenes); its ability to modulate, e.g., decreased or increased, cleavage of a single strand of a nucleic acid, e.g., a non-complimentary strand of a nucleic acid molecule or a complementary strand of a nucleic acid molecule (nickase activity), e.g., as compared to a naturally occurring Cas9 molecule (e.g., a Cas9 molecule of S.pyogenes); or the ability to cleave a nucleic acid molecule, e.g., a double stranded or single stranded nucleic acid molecule, can be eliminated.

### Modified Cleavage Active Cas9 Molecules

[0363] In an embodiment, an active Cas9 molecule comprises one or more of the following activities: cleavage activity associated with an N-terminal RuvC-like domain; cleavage activity associated with an HNH-like domain; cleavage activity associated with an HNH domain and cleavage activity associated with an N-terminal RuvC-like domain.

[0364] In an embodiment, the Cas9 molecule is a Cas9 nickase, e.g., cleaves only a single strand of DNA. In an embodiment, the Cas9 nickase includes a mutation at position 10 and/or a mutation at position 840 of SEQ ID NO: 3133, e.g., comprises a D10A and/or H840A mutation to SEQ ID NO: 3133.

### Non-Cleaving Inactive Cas9 Molecules

[0365] In an embodiment, the altered Cas9 molecule is an inactive Cas9 molecule which does not cleave a nucleic acid molecule (either double stranded or single stranded nucleic acid molecules) or cleaves a nucleic acid molecule with significantly less efficiency, e.g., less than 20, 10, 5, 1 or 0.1 % of the cleavage activity of a reference Cas9 molecule, e.g., as measured by an assay described herein. The reference Cas9 molecule can by a naturally occurring unmodified Cas9 molecule, e.g., a naturally occurring Cas9 molecule such as a Cas9 molecule of S.pyogenes, S.thermophilus, S.aureus or N.meningitidis. In an embodiment, the reference Cas9 molecule is the naturally occurring Cas9 molecule having the closest sequence identity or homology. In an embodiment, the inactive Cas9 molecule lacks substantial cleavage activity associated with an N- terminal RuvC-like domain and cleavage activity associated with an HNH-like domain.

[0366] In an embodiment, the Cas9 molecule is dCas9 (Tsai et al. (2014), Nat. Biotech. 32:569-577).

[0367] A catalytically inactive Cas9 molecule may be fused with a transcription repressor. An inactive Cas9 fusion protein complexes with a gRNA and localizes to a DNA sequence specified by gRNA’s targeting domain, but, unlike an active Cas9, it will not cleave the target DNA. Fusion of an effector domain, such as a transcriptional repression domain, to an inactive Cas9 enables recruitment of the effector to any DNA site specified by the gRNA. Site specific targeting of a Cas9 fusion protein to a promoter region of a gene can block or affect polymerase binding to the promoter region, for example, a Cas9 fusion with a transcription factor (e.g., a transcription activator) and/or a transcriptional enhancer binding to the nucleic acid to increase or inhibit transcription activation. Alternatively, site specific targeting of a a Cas9- fusion to a transcription repressor to a promoter region of a gene can be used to decrease transcription activation.

[0368] Transcription repressors or transcription repressor domains that may be fused to an inactive Cas9 molecule can include ruppel associated box (KRAB or SKD), the Mad mSIN3 interaction domain (SID) or the ERF repressor domain (ERD).

[0369] In another embodiment, an inactive Cas9 molecule may be fused with a protein that modifies chromatin. For example, an inactive Cas9 molecule may be fused to heterochromatin protein 1 (HP1 ), a histone lysine methyltransferase (e.g., SUV39H 1, SUV39H2, G9A, ESET/SETDB 1, Pr-SET7/8, SUV4-20H 1,RIZ1), a histone lysine demethylates (e.g., LSD1/BHC1 10, SpLsdl/Sw, 1/Safl 10, Su(var)3-3, JMJD2A/JHDM3A, JMJD2B, JMJD2C/GASC1, JMJD2D, Rph 1, JARID 1 A/RBP2, JARI DIB/PLU-I, JARID 1C/SMCX, JARID1 D/SMCY, Lid, Jhn2, Jmj2), a histone lysine deacetylases (e.g., HDAC1, HDAC2, HDAC3, HDAC8, Rpd3, Hos 1, Cir6, HDAC4, HDAC5, HDAC7, HDAC9, Hdal, Cir3, SIRT 1, SIRT2, Sir2, Hst 1, Hst2, Hst3, Hst4, HDAC 1 1 ) and a DNA methylases (DNMT1,DNMT2a/DMNT3b, MET1). An inactive Cas9-chomatin modifying molecule fusion protein can be used to alter chromatin status to reduce expression a target gene.

[0370] The heterologous sequence (e.g., the transcription repressor domain) may be fused to the N- or C-terminus of the inactive Cas9 protein. In an alternative embodiment, the heterologous sequence (e.g., the transcription repressor domain) may be fused to an internal portion (i.e., a portion other than the N-terminus or C-terminus) of the inactive Cas9 protein.

[0371] The ability of a Cas9 molecule/gRNA molecule complex to bind to and cleave a target nucleic acid can be evaluated, e.g., by the methods described herein in Section ΠI. The activity of a Cas9 molecule, e.g., either an active Cas9 or a inactive Cas9, alone or in a complex with a gRNA molecule may also be evaluated by methods well-known in the art, including, gene expression assays and chromatin-based assays, e.g., chromatin immunoprecipitation (ChiP) and chromatin in vivo assay (CiA).

### Other Cas9 Molecule Fusions

[0372] In embodiments, the Cas9 molecule, e.g, a Cas9 of S.pyogenes, may additionally comprise one or more amino acid sequences that confer additional activity.

[0373] In some aspects, the Cas9 molecule may comprise one or more nuclear localization sequences (NLSs), such as at least 1, 2, 3, 4, 5, 6, 7, 8, 9, 10, or more NLSs. In some embodiments, the Cas9 molecule comprises at least 1, 2, 3, 4, 5, 6, 7, 8, 9, 10, or more NLSs at or near the amino-terminus, at least 1, 2, 3, 4, 5, 6, 7, 8, 9, 10, or more NLSs at or near the carboxy-terminus, or a combination of these (e.g. one or more NLS at the amino-terminus and one or more NLS at the carboxy terminus). When more than one NLS is present, each may be selected independently of the others, such that a single NLS may be present in more than one copy and/or in combination with one or more other NLSs present in one or more copies. In some embodiments, an NLS is considered near the N- or C-terminus when the nearest amino acid of the NLS is within about 1, 2, 3, 4, 5, 10, 15, 20, 25, 30, 40, 50, or more amino acids along the polypeptide chain from the N- or C-terminus. Typically, an NLS consists of one or more short sequences of positively charged lysines or arginines exposed on the protein surface, but other types of NLS are known. Non-limiting examples of NLSs include an NLS sequence comprising or derived from: the NLS of the SV40 virus large T-antigen, having the amino acid sequence

PKKKRKV (SEQ ID NO: 3134);

the NLS from nucleoplasmin (e.g. the nucleoplasmin bipartite NLS with the sequence

KRPAATKKAGQAKKKK (SEQ ID NO: 3135);

the c-myc NLS having the amino acid sequence

PAAKRVKLD (SEQ ID NO: 3136)

or

RQRRNELKRSP (SEQ ID NO: 3137);

the hRNPAl M9 NLS having the sequence

NQSSNFGPMKGGNFGGRSSGPYGGGGQYFAKPRNQGGY (SEQ ID NO:
3138);

the sequence

RMRIZFKNKGKDTAELRRRRVEVSVELRKAKKDEQILKRRNV (SEQ ID
NO: 3139)

of the IBB domain from importin-alpha; the sequences

VSRKRPRP (SEQ ID NO: 3140)

and

PPKKARED (SEQ ID NO: 3141)

of the myoma T protein; the sequence

PQPKKKPL (SEQ ID NO: 3142)

of human p53; the sequence

SALIKKKKKMAP (SEQ ID NO: 3143)

of mouse c-ab1 IV; the sequences

DRLRR (SEQ ID NO: 3144)

and

PKQKKRK (SEQ ID NO: 3145)

of the influenza virus NS1; the sequence

RKLKKKIKKL (SEQ ID NO: 3146)

of the Hepatitis virus delta antigen; thesequence

REKKKFLKRR (SEQ ID NO: 3147)

of the mouse Mx1 protein; the sequence

KRKGDEVDGVDEVAKKKSKK (SEQ ID NO: 3148)

of the human poly(ADP-ribose) polymerase; and the sequence

RKCLQAGMNLEARKTKK (SEQ ID NO: 3149)

of the steroid hormone receptors (human) glucocorticoid. Other suitable NLS sequences are known in the art (e.g., Sorokin, Biochemistry (Moscow) (2007) 72:13, 1439-1457; Lange J Biol Chem. (2007) 282:8, 5101-5).

[0374] In an embodiment, the Cas9 molecule, e.g., S.pyogenes Cas9 molecule, comprises a NLS sequence of SV40, e.g., disposed N terminal to the Cas9 molecule. In an embodiment, the Cas9 molecule, e.g., S. pyogenes Cas9 molecule, comprises a NLS sequence of SV40 disposed N-terminal to the Cas9 molecule and a NLS sequence of SV40 disposed C terminal to the Cas9 molecule. In an embodiment, the Cas9 molecule, e.g., S.pyogenes Cas9 molecule, comprises a NLS sequence of SV40 disposed N-terminal to the Cas9 molecule and a NLS sequence of nucleoplasmin disposed C-terminal to the Cas9 molecule. In any of the aforementioned embodiments, the molecule may additionally comprise a tag, e.g., a His tag, e.g., a His(6) tag (SEQ ID NO: 3175) or His(8) tag (SEQ ID NO : 3176), e.g., at the N terminus or the C terminus.

[0375] In some aspects, the Cas9 molecule may comprise one or more amino acid sequences that allow the Cas9 molecule to be specifically recognized, for example a tag. In one embodiment, the tag is a Histidine tag, e.g., a histidine tag comprising at least 3, 4, 5, 6, 7, 8, 9, 10 or more histidine amino acids. In embodiments, the histidine tag is a His6 tag (six histidines) (SEQ ID NO: 3175). In other embodiments, the histidine tag is a His8 tag (eight histidines) (SEQ ID NO: 3176). In embodiments, the histidine tag may be separated from one or more other portions of the Cas9 molecule by a linker. In embodiments, the linker is GGS. An example of such a fusion is the Cas9 molecule iProt106520.

[0376] In some aspects, the Cas9 molecule may comprise one or more amino acid sequences that are recognized by a protease (e.g., comprise a protease cleavage site). In embodiments, the cleavage site is the tobacco etch virus (TEV) cleavage site, e.g., comprises the sequence

ENLYFQG (SEQ ID NO: 3158).

In some aspects the protease cleavage site, e.g., the TEV cleavage site is disposed between a tag, e.g., a His tag, e.g., a His6 (SEQ ID NO: 3175) or His8 tag (SEQ ID NO: 3176), and the remainder of the Cas9 molecule. Without being bound by theory it is believed that such introduction will allow for the use of the tag for, e.g., purification of the Cas9 molecule, and then subsequent cleavage so the tag does not interfere with the Cas9 molecule function.

[0377] In embodiments, the Cas9 molecule (e.g., a Cas9 molecule as described herein) comprises an N-terminal NLS, and a C-terminal NLS (e.g., comprises, from N- to C-terminal NLS-Cas9-NLS), e.g., wherein each NLS is an SV40 NLS

(PKKKRKV (SEQ ID NO: 3134)).

In embodiments, the Cas9 molecule (e.g., a Cas9 molecule as described herein) comprises an N-terminal NLS, a C-terminal NLS, and a C-terminal His6 tag (SEQ ID NO: 3175) (e.g., comprises, from N- to C-terminalNLS-Cas9-NLS-His tag), e.g., wherein each NLS is an SV40 NLS

(PKKKRKV (SEQ ID NO: 3134)).

In embodiments, the Cas9molecule (e.g., a Cas9 molecule as described herein) comprises an N-terminal His tag (e.g., His6 tag (SEQ ID NO: 3175)), anN-terminal NLS, and a C-terminal NLS (e.g., comprises, from N- to C-terminal His tag-NLS-Cas9-NLS), e.g., wherein each NLS is an SV40 NLS

(PKKKRKV (SEQ ID NO: 3134)).

In embodiments, the Cas9 molecule (e.g., a Cas9 molecule as described herein) comprises an N-terminal NLS and a C-terminal His tag (e.g., His6 tag (SEQ ID NO: 3175)) (e.g., comprises from N- to C-terminal His tag-Cas9-NLS), e.g., wherein the NLS is an SV40 NLS

(PKKKRKV (SEQ ID NO: 3134)).

In embodiments, the Cas9 molecule (e.g., a Cas9 molecule as described herein) comprises an N-terminal NLS and a C-terminal His tag (e.g., His6 tag (SEQ ID NO: 3175)) (e.g., comprises from N- to C-terminal NLS-Cas9-His tag), e.g., wherein the NLS is an SV40 NLS

(PKKKRKV (SEQ ID NO: 3134)).

In embodiments, the Cas9 molecule (e.g., a Cas9 molecule as described herein) comprises an N-terminal His tag (e.g., His8 tag (SEQ ID NO: 3176)), an N-terminal cleavage domain (e.g., a tobacco etch virus (TEV) cleavage domain (e.g., comprises the sequence

ENLYFQG (SEQ ID NO: 3158))),

an N-terminal NLS (e.g., an SV40 NLS; SEQ ID NO: 3134), and a C-terminalNLS (e.g., an SV40 NLS; SEQ ID NO: 3134) (e.g., comprises from N- to C- terminal His tag-TEV-NLS-Cas9-NLS). In any of the aforementioned embodiments the Cas9 has the sequence of SEQ ID NO: 3133. Alternatively, in any of the aforementioned embodiments, the Cas9 has a sequence of a Cas9 variant of SEQ ID NO: 3133, e.g., as described herein. In any of the aforementioned embodiments, the Cas9 molecule comprises a linker between the His tag and another portion of the molecule, e.g., a GGS linker. Amino acid sequences of exemplary Cas9 molecules described above are provided below.

[0378] iProt105026 (also referred to as iProt106154, iProt106331, iProt106545, and PID426303, depending on the preparation of the protein) (SEQ ID NO: 3161):

MAPKKKRKVD KKYSIGLDIG TNSVGWAVIT DEYKVPSKKF KVLGNTDRHS IKKNLIGALL
FDSGETAEAT RLKRTARRRY TRRKNRICYL QEIFSNEMAK VDDSFFHRLE ESFLVEEDKK
HERHPIFGNI VDEVAYHEKY PTIYHLRKKL VDSTDKADLR LIYLALAHMI KFRGHFLIEG
DLNPDNSDVD KLFIQLVQTY NQLFEENPIN ASGVDAKAIL SARLSKSRRL ENLIAQLPGE
KKNGLFGNLI ALSLGLTPNF KSNFDLAEDA KLQLSKDTYD DDLDNLLAQI GDQYADLFLA
AKNLSDAILL SDILRVNTEI TKAPLSASMI KRYDEHHQDL TLLKALVRQQ LPEKYKEIFF
DQSKNGYAGY IDGGASQEEF YKFIKPILEK MDGTEELLVK LNREDLLRKQ RTFDNGSIPH
QIHLGELHAI LRRQEDFYPF LKDNREKIEK ILTFRIPYYV GPLARGNSRF AWMTRKSEET
ITPWNFEEVV DKGASAQSFI ERMTNFDKNL PNEKVLPKHS LLYEYFTVYN ELTKVKYVTE
GMRKPAFLSG EQKKAIVDLL FKTNRKVTVK QLKEDYFKKI ECFDSVEISG VEDRFNASLG
TYHDLLKIIK DKDFLDNEEN EDILEDIVLT LTLFEDREMI EERLKTYAHL FDDKVMKQLK
RRRYTGWGRL SRKLINGIRD KQSGKTILDF LKSDGFANRN FMQLIHDDSL TFKEDIQKAQ
VSGQGDSLHE HIANLAGSPA IKKGILQTVK VVDELVKVMG RHKPENIVIE MARENQTTQK
GQKNSRERMK RIEEGIKELG SQILKEHPVE NTQLQNEKLY LYYLQNGRDM YVDQELDINR
LSDYDVDHIV PQSFLKDDSI DNKVLTRSDK NRGKSDNVPS EEVVKKMKNY WRQLLNAKLI
TQRKFDNLTK AERGGLSELD KAGFIKRQLV ETRQITKHVA QILDSRMNTK YDENDKLIRE
VKVITLKSKL VSDFRKDFQF YKVREINNYH HAHDAYLNAV VGTALIKKYP KLESEFVYGD
YKVYDVRKMI AKSEQEIGKA TAKYFFYSNI MNFFKTEITL ANGEIRKRPL IETNGETGEI
VWDKGRDFAT VRKVLSMPQV NIVKKTEVQT GGFSKESILP KRNSDKLIAR KKDWDPKKYG
GFDSPTVAYS VLVVAKVEKG KSKKLKSVKE LLGITIMERS SFEKNPIDFL EAKGYKEVKK
DLIIKLPKYS LFELENGRKR MLASAGELQK GNELALPSKY VNFLYLASHY EKLKGSPEDN
EQKQLFVEQH KHYLDEIIEQ ISEFSKRVIL ADANLDKVLS AYNKHRDKPI REQAENIIHL
FTLTNLGAPA AFKYFDTTID RKRYTSTKEV LDATLIHQSI TGLYETRIDL SQLGGDSRAD
PKKKRKVHHH HHH

[0379] iProt106518 (SEQ ID NO: 3162):

MAPKKKRKVD KKYSIGLDIG TNSVGWAVIT DEYKVPSKKF KVLGNTDRHS IKKNLIGALL
FDSGETAEAT RLKRTARRRY TRRKNRILYL QEIFSNEMAK VDDSFFHRLE ESFLVEEDKK
HERHPIFGNI VDEVAYHEKY PTIYHLRKKL VDSTDKADLR LIYLALAHMI KFRGHFLIEG
DLNPDNSDVD KLFIQLVQTY NQLFEENPIN ASGVDAKAIL SARLSKSRRL ENLIAQLPGE
KKNGLFGNLI ALSLGLTPNF KSNFDLAEDA KLQLSKDTYD DDLDNLLAQI GDQYADLFLA
AKNLSDAILL SDILRVNTEI TKAPLSASMI KRYDEHHQDL TLLKALVRQQ LPEKYKEIFF
DQSKNGYAGY IDGGASQEEF YKFIKPILEK MDGTEELLVK LNREDLLRKQ RTFDNGSIPH
QIHLGELHAI LRRQEDFYPF LKDNREKIEK ILTFRIPYYV GPLARGNSRF AWMTRKSEET
ITPWNFEEVV DKGASAQSFI ERMTNFDKNL PNEKVLPKHS LLYEYFTVYN ELTKVKYVTE
GMRKPAFLSG EQKKAIVDLL FKTNRKVTVK QLKEDYFKKI EEFDSVEISG VEDRFNASLG
TYHDLLKIIK DKDFLDNEEN EDILEDIVLT LTLFEDREMI EERLKTYAHL FDDKVMKQLK
RRRYTGWGRL SRKLINGIRD KQSGKTILDF LKSDGFANRN FMQLIHDDSL TFKEDIQKAQ
VSGQGDSLHE HIANLAGSPA IKKGILQTVK VVDELVKVMG RHKPENIVIE MARENQTTQK
GQKNSRERMK RIEEGIKELG SQILKEHPVE NTQLQNEKLY LYYLQNGRDM YVDQELDINR
LSDYDVDHIV PQSFLKDDSI DNKVLTRSDK NRGKSDNVPS EEVVKKMKNY WRQLLNAKLI
TQRKFDNLTK AERGGLSELD KAGFIKRQLV ETRQITKHVA QILDSRMNTK YDENDKLIRE
VKVITLKSKL VSDFRKDFQF YKVREINNYH HAHDAYLNAV VGTALIKKYP KLESEFVYGD
YKVYDVRKMI AKSEQEIGKA TAKYFFYSNI MNFFKTEITL ANGEIRKRPL IETNGETGEI
VWDKGRDFAT VRKVLSMPQV NIVKKTEVQT GGFSKESILP KRNSDKLIAR KKDWDPKKYG
GFDSPTVAYS VLVVAKVEKG KSKKLKSVKE LLGITIMERS SFEKNPIDFL EAKGYKEVKK
DLIIKLPKYS LFELENGRKR MLASAGELQK GNELALPSKY VNFLYLASHY EKLKGSPEDN
EQKQLFVEQH KHYLDEIIEQ ISEFSKRVIL ADANLDKVLS AYNKHRDKPI REQAENIIHL
FTLTNLGAPA AFKYFDTTID RKRYTSTKEV LDATLIHQSI TGLYETRIDL SQLGGDSRAD
PKKKRKVHHH HHH

[0380] iProt106519 (SEQ ID NO: 3163):

MGSSHHHHHH HHENLYFQGS MDKKYSIGLD IGTNSVGWAV ITDEYKVPSK KFKVLGNTDR
HSIKKNLIGA LLFDSGETAE ATRLKRTARR RYTRRKNRIC YLQEIFSNEM AKVDDSFFHR
LEESFLVEED KKHERHPIFG NIVDEVAYHE KYPTIYHLRK KLVDSTDKAD LRLIYLALAH
MIKFRGHFLI EGDLNPDNSD VDKLFIQLVQ TYNQLFEENP INASGVDAKA ILSARLSKSR
RLENLIAQLP GEKKNGLFGN LIALSLGLTP NFKSNFDLAE DAKLQLSKDT YDDDLDNLLA
QIGDQYADLF LAAKNLSDAI LLSDILRVNT EITKAPLSAS MIKRYDEHHQ DLTLLKALVR
QQLPEKYKEI FFDQSKNGYA GYIDGGASQE EFYKFIKPIL EKMDGTEELL VKLNREDLLR
KQRTFDNGSI PHQIHLGELH AILRRQEDFY PFLKDNREKI EKILTFRIPY YVGPLARGNS
RFAWMTRKSE ETITPWNFEE VVDKGASAQS FIERMTNFDK NLPNEKVLPK HSLLYEYFTV
YNELTKVKYV TEGMRKPAFL SGEQKKAIVD LLFKTNRKVT VKQLKEDYFK KIECFDSVEI
SGVEDRFNAS LGTYHDLLKI IKDKDFLDNE ENEDILEDIV LTLTLFEDRE MIEERLKTYA
HLFDDKVMKQ LKRRRYTGWG RLSRKLINGI RDKQSGKTIL DFLKSDGFAN RNFMQLIHDD
SLTFKEDIQK AQVSGQGDSL HEHIANLAGS PAIKKGILQT VKVVDELVKV MGRHKPENIV
IEMARENQTT QKGQKNSRER MKRIEEGIKE LGSQILKEHP VENTQLQNEK LYLYYLQNGR
DMYVDQELDI NRLSDYDVDH IVPQSFLKDD SIDNKVLTRS DKNRGKSDNV PSEEVVKKMK
NYWRQLLNAK LITQRKFDNL TKAERGGLSE LDKAGFIKRQ LVETRQITKH VAQILDSRMN
TKYDENDKLI REVKVITLKS KLVSDFRKDF QFYKVREINN YHHAHDAYLN AVVGTALIKK
YPKLESEFVY GDYKVYDVRK MIAKSEQEIG KATAKYFFYS NIMNFFKTEI TLANGEIRKR
PLIETNGETG EIVWDKGRDF ATVRKVLSMP QVNIVKKTEV QTGGFSKESI LPKRNSDKLI
ARKKDWDPKK YGGFDSPTVA YSVLVVAKVE KGKSKKLKSV KELLGITIME RSSFEKNPID
FLEAKGYKEV KKDLIIKLPK YSLFELENGR KRMLASAGEL QKGNELALPS KYVNFLYLAS
HYEKLKGSPE DNEQKQLFVE QHKHYLDEII EQISEFSKRV ILADANLDKV LSAYNKHRDK
PIREQAENII HLFTLTNLGA PAAFKYFDTT IDRKRYTSTK EVLDATLIHQ SITGLYETRI
DLSQLGGDGG GSPKKKRKV

[0381] iProt106520 (SEQ ID NO: 3164):

MAHHHHHHGG SPKKKRKVDK KYSIGLDIGT NSVGWAVITD EYKVPSKKFK VLGNTDRHSI
KKNLIGALLF DSGETAEATR LKRTARRRYT RRKNRICYLQ EIFSNEMAKV DDSFFHRLEE
SFLVEEDKKH ERHPIFGNIV DEVAYHEKYP TIYHLRKKLV DSTDKADLRL IYLALAHMIK
FRGHFLIEGD LNPDNSDVDK LFIQLVQTYN QLFEENPINA SGVDAKAILS ARLSKSRRLE
NLIAQLPGEK KNGLFGNLIA LSLGLTPNFK SNFDLAEDAK LQLSKDTYDD DLDNLLAQIG
DQYADLFLAA KNLSDAILLS DILRVNTEIT KAPLSASMIK RYDEHHQDLT LLKALVRQQL
PEKYKEIFFD QSKNGYAGYI DGGASQEEFY KFIKPILEKM DGTEELLVKL NREDLLRKQR
TFDNGSIPHQ IHLGELHAIL RRQEDFYPFL KDNREKIEKI LTFRIPYYVG PLARGNSRFA
WMTRKSEETI TPWNFEEVVD KGASAQSFIE RMTNFDKNLP NEKVLPKHSL LYEYFTVYNE
LTKVKYVTEG MRKPAFLSGE QKKAIVDLLF KTNRKVTVKQ LKEDYFKKIE CFDSVEISGV
EDRFNASLGT YHDLLKIIKD KDFLDNEENE DILEDIVLTL TLFEDREMIE ERLKTYAHLF
DDKVMKQLKR RRYTGWGRLS RKLINGIRDK QSGKTILDFL KSDGFANRNF MQLIHDDSLT
FKEDIQKAQV SGQGDSLHEH IANLAGSPAI KKGILQTVKV VDELVKVMGR HKPENIVIEM
ARENQTTQKG QKNSRERMKR IEEGIKELGS QILKEHPVEN TQLQNEKLYL YYLQNGRDMY
VDQELDINRL SDYDVDHIVP QSFLKDDSID NKVLTRSDKN RGKSDNVPSE EVVKKMKNYW
RQLLNAKLIT QRKFDNLTKA ERGGLSELDK AGFIKRQLVE TRQITKHVAQ ILDSRMNTKY
DENDKLIREV KVITLKSKLV SDFRKDFQFY KVREINNYHH AHDAYLNAVV GTALIKKYPK
LESEFVYGDY KVYDVRKMIA KSEQEIGKAT AKYFFYSNIM NFFKTEITLA NGEIRKRPLI
ETNGETGEIV WDKGRDFATV RKVLSMPQVN IVKKTEVQTG GFSKESILPK RNSDKLIARK
KDWDPKKYGG FDSPTVAYSV LVVAKVEKGK SKKLKSVKEL LGITIMERSS FEKNPIDFLE
AKGYKEVKKD LIIKLPKYSL FELENGRKRM LASAGELQKG NELALPSKYV NFLYLASHYE
KLKGSPEDNE QKQLFVEQHK HYLDEIIEQI SEFSKRVILA DANLDKVLSA YNKHRDKPIR
EQAENIIHLF TLTNLGAPAA FKYFDTTIDR KRYTSTKEVL DATLIHQSIT GLYETRIDLS
QLGGDSRADP KKKRKV

[0382] iProt106521 (SEQ ID NO: 3165):

MAPKKKRKVD KKYSIGLDIG TNSVGWAVIT DEYKVPSKKF KVLGNTDRHS IKKNLIGALL
FDSGETAEAT RLKRTARRRY TRRKNRICYL QEIFSNEMAK VDDSFFHRLE ESFLVEEDKK
HERHPIFGNI VDEVAYHEKY PTIYHLRKKL VDSTDKADLR LIYLALAHMI KFRGHFLIEG
DLNPDNSDVD KLFIQLVQTY NQLFEENPIN ASGVDAKAIL SARLSKSRRL ENLIAQLPGE
KKNGLFGNLI ALSLGLTPNF KSNFDLAEDA KLQLSKDTYD DDLDNLLAQI GDQYADLFLA
AKNLSDAILL SDILRVNTEI TKAPLSASMI KRYDEHHQDL TLLKALVRQQ LPEKYKEIFF
DQSKNGYAGY IDGGASQEEF YKFIKPILEK MDGTEELLVK LNREDLLRKQ RTFDNGSIPH
QIHLGELHAI LRRQEDFYPF LKDNREKIEK ILTFRIPYYV GPLARGNSRF AWMTRKSEET
ITPWNFEEVV DKGASAQSFI ERMTNFDKNL PNEKVLPKHS LLYEYFTVYN ELTKVKYVTE
GMRKPAFLSG EQKKAIVDLL FKTNRKVTVK QLKEDYFKKI ECFDSVEISG VEDRFNASLG
TYHDLLKIIK DKDFLDNEEN EDILEDIVLT LTLFEDREMI EERLKTYAHL FDDKVMKQLK
RRRYTGWGRL SRKLINGIRD KQSGKTILDF LKSDGFANRN FMQLIHDDSL TFKEDIQKAQ
VSGQGDSLHE HIANLAGSPA IKKGILQTVK VVDELVKVMG RHKPENIVIE MARENQTTQK
GQKNSRERMK RIEEGIKELG SQILKEHPVE NTQLQNEKLY LYYLQNGRDM YVDQELDINR
LSDYDVDHIV PQSFLKDDSI DNKVLTRSDK NRGKSDNVPS EEVVKKMKNY WRQLLNAKLI
TQRKFDNLTK AERGGLSELD KAGFIKRQLV ETRQITKHVA QILDSRMNTK YDENDKLIRE
VKVITLKSKL VSDFRKDFQF YKVREINNYH HAHDAYLNAV VGTALIKKYP KLESEFVYGD
YKVYDVRKMI AKSEQEIGKA TAKYFFYSNI MNFFKTEITL ANGEIRKRPL IETNGETGEI
VWDKGRDFAT VRKVLSMPQV NIVKKTEVQT GGFSKESILP KRNSDKLIAR KKDWDPKKYG
GFDSPTVAYS VLVVAKVEKG KSKKLKSVKE LLGITIMERS SFEKNPIDFL EAKGYKEVKK
DLIIKLPKYS LFELENGRKR MLASAGELQK GNELALPSKY VNFLYLASHY EKLKGSPEDN
EQKQLFVEQH KHYLDEIIEQ ISEFSKRVIL ADANLDKVLS AYNKHRDKPI REQAENIIHL
FTLTNLGAPA AFKYFDTTID RKRYTSTKEV LDATLIHQSI TGLYETRIDL SQLGGDSRAD
HHHHHH

[0383] iProt106522 (SEQ ID NO: 3166):

MAHHHHHHGG SDKKYSIGLD IGTNSVGWAV ITDEYKVPSK KFKVLGNTDR HSIKKNLIGA
LLFDSGETAE ATRLKRTARR RYTRRKNRIC YLQEIFSNEM AKVDDSFFHR LEESFLVEED
KKHERHPIFG NIVDEVAYHE KYPTIYHLRK KLVDSTDKAD LRLIYLALAH MIKFRGHFLI
EGDLNPDNSD VDKLFIQLVQ TYNQLFEENP INASGVDAKA ILSARLSKSR RLENLIAQLP
GEKKNGLFGN LIALSLGLTP NFKSNFDLAE DAKLQLSKDT YDDDLDNLLA QIGDQYADLF
LAAKNLSDAI LLSDILRVNT EITKAPLSAS MIKRYDEHHQ DLTLLKALVR QQLPEKYKEI
FFDQSKNGYA GYIDGGASQE EFYKFIKPIL EKMDGTEELL VKLNREDLLR KQRTFDNGSI
PHQIHLGELH AILRRQEDFY PFLKDNREKI EKILTFRIPY YVGPLARGNS RFAWMTRKSE
ETITPWNFEE VVDKGASAQS FIERMTNFDK NLPNEKVLPK HSLLYEYFTV YNELTKVKYV
TEGMRKPAFL SGEQKKAIVD LLFKTNRKVT VKQLKEDYFK KIECFDSVEI SGVEDRFNAS
LGTYHDLLKI IKDKDFLDNE ENEDILEDIV LTLTLFEDRE MIEERLKTYA HLFDDKVMKQ
LKRRRYTGWG RLSRKLINGI RDKQSGKTIL DFLKSDGFAN RNFMQLIHDD SLTFKEDIQK
AQVSGQGDSL HEHIANLAGS PAIKKGILQT VKVVDELVKV MGRHKPENIV IEMARENQTT
QKGQKNSRER MKRIEEGIKE LGSQILKEHP VENTQLQNEK LYLYYLQNGR DMYVDQELDI
NRLSDYDVDH IVPQSFLKDD SIDNKVLTRS DKNRGKSDNV PSEEVVKKMK NYWRQLLNAK
LITQRKFDNL TKAERGGLSE LDKAGFIKRQ LVETRQITKH VAQILDSRMN TKYDENDKLI
REVKVITLKS KLVSDFRKDF QFYKVREINN YHHAHDAYLN AVVGTALIKK YPKLESEFVY
GDYKVYDVRK MIAKSEQEIG KATAKYFFYS NIMNFFKTEI TLANGEIRKR PLIETNGETG
EIVWDKGRDF ATVRKVLSMP QVNIVKKTEV QTGGFSKESI LPKRNSDKLI ARKKDWDPKK
YGGFDSPTVA YSVLVVAKVE KGKSKKLKSV KELLGITIME RSSFEKNPID FLEAKGYKEV
KKDLIIKLPK YSLFELENGR KRMLASAGEL QKGNELALPS KYVNFLYLAS HYEKLKGSPE
DNEQKQLFVE QHKHYLDEII EQISEFSKRV ILADANLDKV LSAYNKHRDK PIREQAENII
HLFTLTNLGA PAAFKYFDTT IDRKRYTSTK EVLDATLIHQ SITGLYETRI DLSQLGGDSR
ADPKKKRKV

[0384] iProt106658 (SEQ ID NO: 3167):

MGSSHHHHHH HHENLYFQGS MDKKYSIGLD IGTNSVGWAV ITDEYKVPSK KFKVLGNTDR
HSIKKNLIGA LLFDSGETAE ATRLKRTARR RYTRRKNRIC YLQEIFSNEM AKVDDSFFHR
LEESFLVEED KKHERHPIFG NIVDEVAYHE KYPTIYHLRK KLVDSTDKAD LRLIYLALAH
MIKFRGHFLI EGDLNPDNSD VDKLFIQLVQ TYNQLFEENP INASGVDAKA ILSARLSKSR
RLENLIAQLP GEKKNGLFGN LIALSLGLTP NFKSNFDLAE DAKLQLSKDT YDDDLDNLLA
QIGDQYADLF LAAKNLSDAI LLSDILRVNT EITKAPLSAS MIKRYDEHHQ DLTLLKALVR
QQLPEKYKEI FFDQSKNGYA GYIDGGASQE EFYKFIKPIL EKMDGTEELL VKLNREDLLR
KQRTFDNGSI PHQIHLGELH AILRRQEDFY PFLKDNREKI EKILTFRIPY YVGPLARGNS
RFAWMTRKSE ETITPWNFEE VVDKGASAQS FIERMTNFDK NLPNEKVLPK HSLLYEYFTV
YNELTKVKYV TEGMRKPAFL SGEQKKAIVD LLFKTNRKVT VKQLKEDYFK KIECFDSVEI
SGVEDRFNAS LGTYHDLLKI IKDKDFLDNE ENEDILEDIV LTLTLFEDRE MIEERLKTYA
HLFDDKVMKQ LKRRRYTGWG RLSRKLINGI RDKQSGKTIL DFLKSDGFAN RNFMQLIHDD
SLTFKEDIQK AQVSGQGDSL HEHIANLAGS PAIKKGILQT VKVVDELVKV MGRHKPENIV
IEMARENQTT QKGQKNSRER MKRIEEGIKE LGSQILKEHP VENTQLQNEK LYLYYLQNGR
DMYVDQELDI NRLSDYDVDH IVPQSFLKDD SIDNKVLTRS DKNRGKSDNV PSEEVVKKMK
NYWRQLLNAK LITQRKFDNL TKAERGGLSE LDKAGFIKRQ LVETRQITKH VAQILDSRMN
TKYDENDKLI REVKVITLKS KLVSDFRKDF QFYKVREINN YHHAHDAYLN AVVGTALIKK
YPKLESEFVY GDYKVYDVRK MIAKSEQEIG KATAKYFFYS NIMNFFKTEI TLANGEIRKR
PLIETNGETG EIVWDKGRDF ATVRKVLSMP QVNIVKKTEV QTGGFSKESI LPKRNSDKLI
ARKKDWDPKK YGGFDSPTVA YSVLVVAKVE KGKSKKLKSV KELLGITIME RSSFEKNPID
FLEAKGYKEV KKDLIIKLPK YSLFELENGR KRMLASAGEL QKGNELALPS KYVNFLYLAS
HYEKLKGSPE DNEQKQLFVE QHKHYLDEII EQISEFSKRV ILADANLDKV LSAYNKHRDK
PIREQAENII HLFTLTNLGA PAAFKYFDTT IDRKRYTSTK EVLDATLIHQ SITGLYETRI
DLSQLGGDGG GSPKKKRKV

[0385] iProt106745 (SEQ ID NO: 3168):

MAPKKKRKVD KKYSIGLDIG TNSVGWAVIT DEYKVPSKKF KVLGNTDRHS IKKNLIGALL
FDSGETAEAT RLKRTARRRY TRRKNRICYL QEIFSNEMAK VDDSFFHRLE ESFLVEEDKK
HERHPIFGNI VDEVAYHEKY PTIYHLRKKL VDSTDKADLR LIYLALAHMI KFRGHFLIEG
DLNPDNSDVD KLFIQLVQTY NQLFEENPIN ASGVDAKAIL SARLSKSRRL ENLIAQLPGE
KKNGLFGNLI ALSLGLTPNF KSNFDLAEDA KLQLSKDTYD DDLDNLLAQI GDQYADLFLA
AKNLSDAILL SDILRVNTEI TKAPLSASMI KRYDEHHQDL TLLKALVRQQ LPEKYKEIFF
DQSKNGYAGY IDGGASQEEF YKFIKPILEK MDGTEELLVK LNREDLLRKQ RTFDNGSIPH
QIHLGELHAI LRRQEDFYPF LKDNREKIEK ILTFRIPYYV GPLARGNSRF AWMTRKSEET
ITPWNFEEVV DKGASAQSFI ERMTNFDKNL PNEKVLPKHS LLYEYFTVYN ELTKVKYVTE
GMRKPAFLSG EQKKAIVDLL FKTNRKVTVK QLKEDYFKKI ECFDSVEISG VEDRFNASLG
TYHDLLKIIK DKDFLDNEEN EDILEDIVLT LTLFEDREMI EERLKTYAHL FDDKVMKQLK
RRRYTGWGRL SRKLINGIRD KQSGKTILDF LKSDGFANRN FMQLIHDDSL TFKEDIQKAQ
VSGQGDSLHE HIANLAGSPA IKKGILQTVK VVDELVKVMG RHKPENIVIE MARENQTTQK
GQKNSRERMK RIEEGIKELG SQILKEHPVE NTQLQNEKLY LYYLQNGRDM YVDQELDINR
LSDYDVDHIV PQSFLKDDSI DNAVLTRSDK NRGKSDNVPS EEVVKKMKNY WRQLLNAKLI
TQRKFDNLTK AERGGLSELD KAGFIKRQLV ETRQITKHVA QILDSRMNTK YDENDKLIRE
VKVITLKSKL VSDFRKDFQF YKVREINNYH HAHDAYLNAV VGTALIKKYP KLESEFVYGD
YKVYDVRKMI AKSEQEIGKA TAKYFFYSNI MNFFKTEITL ANGEIRKRPL IETNGETGEI
VWDKGRDFAT VRKVLSMPQV NIVKKTEVQT GGFSKESILP KRNSDKLIAR KKDWDPKKYG
GFDSPTVAYS VLVVAKVEKG KSKKLKSVKE LLGITIMERS SFEKNPIDFL EAKGYKEVKK
DLIIKLPKYS LFELENGRKR MLASAGELQK GNELALPSKY VNFLYLASHY EKLKGSPEDN
EQKQLFVEQH KHYLDEIIEQ ISEFSKRVIL ADANLDKVLS AYNKHRDKPI REQAENIIHL
FTLTNLGAPA AFKYFDTTID RKRYTSTKEV LDATLIHQSI TGLYETRIDL SQLGGDSRAD
PKKKRKVHHH HHH

[0386] iProt106746 (SEQ ID NO: 3169):

MAPKKKRKVD KKYSIGLDIG TNSVGWAVIT DEYKVPSKKF KVLGNTDRHS IKKNLIGALL
FDSGETAEAT RLKRTARRRY TRRKNRICYL QEIFSNEMAK VDDSFFHRLE ESFLVEEDKK
HERHPIFGNI VDEVAYHEKY PTIYHLRKKL VDSTDKADLR LIYLALAHMI KFRGHFLIEG
DLNPDNSDVD KLFIQLVQTY NQLFEENPIN ASGVDAKAIL SARLSKSRRL ENLIAQLPGE
KKNGLFGNLI ALSLGLTPNF KSNFDLAEDA KLQLSKDTYD DDLDNLLAQI GDQYADLFLA
AKNLSDAILL SDILRVNTEI TKAPLSASMI KRYDEHHQDL TLLKALVRQQ LPEKYKEIFF
DQSKNGYAGY IDGGASQEEF YKFIKPILEK MDGTEELLVK LNREDLLRKQ RTFDNGSIPH
QIHLGELHAI LRRQEDFYPF LKDNREKIEK ILTFRIPYYV GPLARGNSRF AWMTRKSEET
ITPWNFEEVV DKGASAQSFI ERMTNFDKNL PNEKVLPKHS LLYEYFTVYN ELTKVKYVTE
GMRKPAFLSG EQKKAIVDLL FKTNRKVTVK QLKEDYFKKI ECFDSVEISG VEDRFNASLG
TYHDLLKIIK DKDFLDNEEN EDILEDIVLT LTLFEDREMI EERLKTYAHL FDDKVMKQLK
RRRYTGWGRL SRKLINGIRD KQSGKTILDF LKSDGFANRN FMQLIHDDSL TFKEDIQKAQ
VSGQGDSLHE HIANLAGSPA IKKGILQTVK VVDELVKVMG RHKPENIVIE MARENQTTQK
GQKNSRERMK RIEEGIKELG SQILKEHPVE NTQLQNEALY LYYLQNGRDM YVDQELDINR
LSDYDVDHIV PQSFLKDDSI DNKVLTRSDK NRGKSDNVPS EEVVKKMKNY WRQLLNAKLI
TQRKFDNLTK AERGGLSELD KAGFIKRQLV ETRQITKHVA QILDSRMNTK YDENDKLIRE
VKVITLKSKL VSDFRKDFQF YKVREINNYH HAHDAYLNAV VGTALIKKYP ALESEFVYGD
YKVYDVRKMI AKSEQEIGKA TAKYFFYSNI MNFFKTEITL ANGEIRKAPL IETNGETGEI
VWDKGRDFAT VRKVLSMPQV NIVKKTEVQT GGFSKESILP KRNSDKLIAR KKDWDPKKYG
GFDSPTVAYS VLVVAKVEKG KSKKLKSVKE LLGITIMERS SFEKNPIDFL EAKGYKEVKK
DLIIKLPKYS LFELENGRKR MLASAGELQK GNELALPSKY VNFLYLASHY EKLKGSPEDN
EQKQLFVEQH KHYLDEIIEQ ISEFSKRVIL ADANLDKVLS AYNKHRDKPI REQAENIIHL
FTLTNLGAPA AFKYFDTTID RKRYTSTKEV LDATLIHQSI TGLYETRIDL SQLGGDSRAD
PKKKRKVHHH HHH

[0387] iProt106747 (SEQ ID NO: 3170):

MAPKKKRKVD KKYSIGLDIG TNSVGWAVIT DEYKVPSKKF KVLGNTDRHS IKKNLIGALL
FDSGETAEAT RLKRTARRRY TRRKNRICYL QEIFSNEMAK VDDSFFHRLE ESFLVEEDKK
HERHPIFGNI VDEVAYHEKY PTIYHLRKKL VDSTDKADLR LIYLALAHMI KFRGHFLIEG
DLNPDNSDVD KLFIQLVQTY NQLFEENPIN ASGVDAKAIL SARLSKSRRL ENLIAQLPGE
KKNGLFGNLI ALSLGLTPNF KSNFDLAEDA KLQLSKDTYD DDLDNLLAQI GDQYADLFLA
AKNLSDAILL SDILRVNTEI TKAPLSASMI KRYDEHHQDL TLLKALVRQQ LPEKYKEIFF
DQSKNGYAGY IDGGASQEEF YKFIKPILEK MDGTEELLVK LNREDLLRKQ RTFDNGSIPH
QIHLGELHAI LRRQEDFYPF LKDNREKIEK ILTFRIPYYV GPLARGNSRF AWMTRKSEET
ITPWNFEEVV DKGASAQSFI ERMTNFDKNL PNEKVLPKHS LLYEYFTVYN ELTKVKYVTE
GMRKPAFLSG EQKKAIVDLL FKTNRKVTVK QLKEDYFKKI ECFDSVEISG VEDRFNASLG
TYHDLLKIIK DKDFLDNEEN EDILEDIVLT LTLFEDREMI EERLKTYAHL FDDKVMKQLK
RRRYTGWGRL SRKLINGIRD KQSGKTILDF LKSDGFANRN FMQLIHDDSL TFKEDIQKAQ
VSGQGDSLHE HIANLAGSPA IKKGILQTVK VVDELVKVMG RHKPENIVIE MARENQTTQK
GQKNSRERMK RIEEGIKELG SQILKEHPVE NTQLQNEKLY LYYLQNGRDM YVDQELDINR
LSDYDVDHIV PQSFLADDSI DNKVLTRSDK NRGKSDNVPS EEVVKKMKNY WRQLLNAKLI
TQRKFDNLTK AERGGLSELD KAGFIKRQLV ETRQITKHVA QILDSRMNTK YDENDKLIRE
VKVITLKSKL VSDFRKDFQF YKVREINNYH HAHDAYLNAV VGTALIKKYP ALESEFVYGD
YKVYDVRKMI AKSEQEIGKA TAKYFFYSNI MNFFKTEITL ANGEIRKAPL IETNGETGEI
VWDKGRDFAT VRKVLSMPQV NIVKKTEVQT GGFSKESILP KRNSDKLIAR KKDWDPKKYG
GFDSPTVAYS VLVVAKVEKG KSKKLKSVKE LLGITIMERS SFEKNPIDFL EAKGYKEVKK
DLIIKLPKYS LFELENGRKR MLASAGELQK GNELALPSKY VNFLYLASHY EKLKGSPEDN
EQKQLFVEQH KHYLDEIIEQ ISEFSKRVIL ADANLDKVLS AYNKHRDKPI REQAENIIHL
FTLTNLGAPA AFKYFDTTID RKRYTSTKEV LDATLIHQSI TGLYETRIDL SQLGGDSRAD
PKKKRKVHHH HHH

[0388] iProt106884 (SEQ ID NO: 3171):

MAPKKKRKVD KKYSIGLDIG TNSVGWAVIT DEYKVPSKKF KVLGNTDRHS IKKNLIGALL
FDSGETAEAT RLKRTARRRY TRRKNRICYL QEIFSNEMAK VDDSFFHRLE ESFLVEEDKK
HERHPIFGNI VDEVAYHEKY PTIYHLRKKL VDSTDKADLR LIYLALAHMI KFRGHFLIEG
DLNPDNSDVD KLFIQLVQTY NQLFEENPIN ASGVDAKAIL SARLSKSRRL ENLIAQLPGE
KKNGLFGNLI ALSLGLTPNF KSNFDLAEDA KLQLSKDTYD DDLDNLLAQI GDQYADLFLA
AKNLSDAILL SDILRVNTEI TKAPLSASMI KRYDEHHQDL TLLKALVRQQ LPEKYKEIFF
DQSKNGYAGY IDGGASQEEF YKFIKPILEK MDGTEELLVK LNREDLLRKQ RTFDNGSIPH
QIHLGELHAI LRRQEDFYPF LKDNREKIEK ILTFRIPYYV GPLARGNSRF AWMTRKSEET
ITPWNFEEVV DKGASAQSFI ERMTAFDKNL PNEKVLPKHS LLYEYFTVYN ELTKVKYVTE
GMRKPAFLSG EQKKAIVDLL FKTNRKVTVK QLKEDYFKKI ECFDSVEISG VEDRFNASLG
TYHDLLKIIK DKDFLDNEEN EDILEDIVLT LTLFEDREMI EERLKTYAHL FDDKVMKQLK
RRRYTGWGAL SRKLINGIRD KQSGKTILDF LKSDGFANRN FMALIHDDSL TFKEDIQKAQ
VSGQGDSLHE HIANLAGSPA IKKGILQTVK VVDELVKVMG RHKPENIVIE MARENQTTQK
GQKNSRERMK RIEEGIKELG SQILKEHPVE NTQLQNEKLY LYYLQNGRDM YVDQELDINR
LSDYDVDHIV PQSFLKDDSI DNKVLTRSDK NRGKSDNVPS EEVVKKMKNY WRQLLNAKLI
TQRKFDNLTK AERGGLSELD KAGFIKRQLV ETRAITKHVA QILDSRMNTK YDENDKLIRE
VKVITLKSKL VSDFRKDFQF YKVREINNYH HAHDAYLNAV VGTALIKKYP KLESEFVYGD
YKVYDVRKMI AKSEQEIGKA TAKYFFYSNI MNFFKTEITL ANGEIRKRPL IETNGETGEI
VWDKGRDFAT VRKVLSMPQV NIVKKTEVQT GGFSKESILP KRNSDKLIAR KKDWDPKKYG
GFDSPTVAYS VLVVAKVEKG KSKKLKSVKE LLGITIMERS SFEKNPIDFL EAKGYKEVKK
DLIIKLPKYS LFELENGRKR MLASAGELQK GNELALPSKY VNFLYLASHY EKLKGSPEDN
EQKQLFVEQH KHYLDEIIEQ ISEFSKRVIL ADANLDKVLS AYNKHRDKPI REQAENIIHL
FTLTNLGAPA AFKYFDTTID RKRYTSTKEV LDATLIHQSI TGLYETRIDL SQLGGDSRAD
PKKKRKVHHH HHH

[0389] iProt 20109496 (SEQ ID NO: 3172)

MAPKKKRKVDKKYSIGLDIGTNSVGWAVITDEYKVPSKKFKVLGNTDRHS
IKKNLIGALLFDSGETAEATRLKRTARRRYTRRKNRILYLQEIFSNEMAK
VDDSFFHRLEESFLVEEDKKHERHPIFGNIVDEVAYHEKYPTIYHLRKKL
VDSTDKADLRLIYLALAHMIKFRGHFLIEGDLNPDNSDVDKLFIQLVQTY
NQLFEENPINASGVDAKAILSARLSKSRRLENLIAQLPGEKKNGLFGNLI
ALSLGLTPNFKSNFDLAEDAKLQLSKDTYDDDLDNLLAQIGDQYADLFLA
AKNLSDAILLSDILRVNTEITKAPLSASMIKRYDEHHQDLTLLKALVRQQ
LPEKYKEIFFDQSKNGYAGYIDGGASQEEFYKFIKPILEKMDGTEELLVK
LNREDLLRKQRTFDNGSIPHQIHLGELHAILRRQEDFYPFLKDNREKIEK
ILTFRIPYYVGPLARGNSRFAWMTRKSEETITPWNFEEVVDKGASAQSFI
ERMTNFDKNLPNEKVLPKHSLLYEYFTVYNELTKVKYVTEGMRKPAFLSG
EQKKAIVDLLFKTNRKVTVKQLKEDYFKKIEEFDSVEISGVEDRFNASLG
TYHDLLKIIKDKDFLDNEENEDILEDIVLTLTLFEDREMIEERLKTYAHL
FDDKVMKQLKRRRYTGWGRLSRKLINGIRDKQSGKTILDFLKSDGFANRN
FMQLIHDDSLTFKEDIQKAQVSGQGDSLHEHIANLAGSPAIKKGILQTVK
VVELVKVMGRHKPENIVIEMARENQTTQKGQKNSRERMKRIEEGIKELGS
QILKEHPVENTQLQNEKLYLYYLQNGRDMYVDQELDINRLSDYDVDHIVP
QSFLKDDSIDNKVLTRSDKNRGKSDNVPSEEWKKMKNYWRQLLNAKLITQ
RKFDNLTKAERGGLSELDKAGFIKRQLVETRQITKHVAQILDSRMNTKYD
ENDKLIREVKVITLKSKLVSDFRKDFQFYKVREINNYHHAHDAYLNAVVG
TALIKKYPKLESEFVYGDYKVYDVRKMIAKSEQEIGKATAKYFFYSNIMN
FFKTEITLANGEIRKRPLIETNGETGEIVWDKGRDFATVRKVLSMPQVNI
VKKTEVQTGGFSKESILPKRNSDKLIARKKDWDPKKYGGFDSPTVAYSVL
VVAKVEKGKSKKLKSVKELLGITIMERSSFEKNPIDFLEAKGYKEVKKDL
IIKLPKYSLFELENGRKRMLASAGELQKGNELALPSKYVNFLYLASHYEK
LKGSPEDNEQKQLFVEQHKHYLDEIIEQISEFSKRVILADANLDKVLSAY
NKHRDKPIREQAENIIHLFTLTNLGAPAAFKYFDTTIDRKRYTSTKEVLD
ATLIHQSITGLYETRIDLSQLGGDSRADHHHHHH

### Nucleic Acids Encoding Cas9 Molecules

[0390] Nucleic acids encoding the Cas9 molecules, e.g., an active Cas9 molecule or an inactive Cas9 molecule are provided herein.

[0391] Exemplary nucleic acids encoding Cas9 molecules are described in Cong et al, SCIENCE 2013, 399(6121):819-823; Wang et al, CELL 2013, 153(4):910-918; Mali et al., SCIENCE 2013, 399(6121):823-826; Jinek et al, SCIENCE 2012, 337(6096):816-821.

[0392] In an embodiment, a nucleic acid encoding a Cas9 molecule can be a synthetic nucleic acid sequence. For example, the synthetic nucleic acid molecule can be chemically modified, e.g., as described in Section XIII. In an embodiment, the Cas9 mRNA has one or more of, e.g., all of the following properties: it is capped, polyadenylated, substituted with 5-methylcytidine and/or pseudouridine.

[0393] In addition or alternatively, the synthetic nucleic acid sequence can be codon optimized, e.g., at least one non-common codon or less-common codon has been replaced by a common codon. For example, the synthetic nucleic acid can direct the synthesis of an optimized messenger mRNA, e.g., optimized for expression in a mammalian expression system, e.g., described herein.

[0394] Provided below is an exemplary codon optimized nucleic acid sequence encoding a Cas9 molecule of S.pyogenes.

ATGGATAAAAAGTACAGCATCGGGCTGGACATCGGTACAAACTCAGTGGG
GTGGGCCGTGATTACGGACGAGTACAAGGTACCCTCCAAAAAATTTAAAG
TGCTGGGTAACACGGACAGACACTCTATAAAGAAAAATCTTATTGGAGCC
TTGCTGTTCGACTCAGGCGAGACAGCCGAAGCCACAAGGTTGAAGCGGAC
CGCCAGGAGGCGGTATACCAGGAGAAAGAACCGCATATGCTACCTGCAAG
AAATCTTCAGTAACGAGATGGCAAAGGTTGACGATAGCTTTTTCCATCGC
CTGGAAGAATCCTTTCTTGTTGAGGAAGACAAGAAGCACGAACGGCACCC
CATCTTTGGCAATATTGTCGACGAAGTGGCATATCACGAAAAGTACCCGA
CTATCTACCACCTCAGGAAGAAGCTGGTGGACTCTACCGATAAGGCGGAC
CTCAGACTTATTTATTTGGCACTCGCCCACATGATTAAATTTAGAGGACA
TTTCTTGATCGAGGGCGACCTGAACCCGGACAACAGTGACGTCGATAAGC
TGTTCATCCAACTTGTGCAGACCTACAATCAACTGTTCGAAGAAAACCCT
ATAAATGCTTCAGGAGTCGACGCTAAAGCAATCCTGTCCGCGCGCCTCTC
AAAATCTAGAAGACTTGAGAATCTGATTGCTCAGTTGCCCGGGGAAAAGA
AAAATGGATTGTTTGGCAACCTGATCGCCCTCAGTCTCGGACTGACCCCA
AATTTCAAAAGTAACTTCGACCTGGCCGAAGACGCTAAGCTCCAGCTGTC
CAAGGACACATACGATGACGACCTCGACAATCTGCTGGCCCAGATTGGGG
ATCAGTACGCCGATCTCTTTTTGGCAGCAAAGAACCTGTCCGACGCCATC
CTGTTGAGCGATATCTTGAGAGTGAACACCGAAATTACTAAAGCACCCCT
TAGCGCATCTATGATCAAGCGGTACGACGAGCATCATCAGGATCTGACCC
TGCTGAAGGCTCTTGTGAGGCAACAGCTCCCCGAAAAATACAAGGAAATC
TTCTTTGACCAGAGCAAAAACGGCTACGCTGGCTATATAGATGGTGGGGC
CAGTCAGGAGGAATTCTATAAATTCATCAAGCCCATTCTCGAGAAAATGG
ACGGCACAGAGGAGTTGCTGGTCAAACTTAACAGGGAGGACCTGCTGCGG
AAGCAGCGGACCTTTGACAACGGGTCTATCCCCCACCAGATTCATCTGGG
CGAACTGCACGCAATCCTGAGGAGGCAGGAGGATTTTTATCCTTTTCTTA
AAGATAACCGCGAGAAAATAGAAAAGATTCTTACATTCAGGATCCCGTAC
TACGTGGGACCTCTCGCCCGGGGCAATTCACGGTTTGCCTGGATGACAAG
GAAGTCAGAGGAGACTATTACACCTTGGAACTTCGAAGAAGTGGTGGACA
AGGGTGCATCTGCCCAGTCTTTCATCGAGCGGATGACAAATTTTGACAAG
AACCTCCCTAATGAGAAGGTGCTGCCCAAACATTCTCTGCTCTACGAGTA
CTTTACCGTCTACAATGAACTGACTAAAGTCAAGTACGTCACCGAGGGAA
TGAGGAAGCCGGCATTCCTTAGTGGAGAACAGAAGAAGGCGATTGTAGAC
CTGTTGTTCAAGACCAACAGGAAGGTGACTGTGAAGCAACTTAAAGAAGA
CTACTTTAAGAAGATCGAATGTTTTGACAGTGTGGAAATTTCAGGGGTTG
AAGACCGCTTCAATGCGTCATTGGGGACTTACCATGATCTTCTCAAGATC
ATAAAGGACAAAGACTTCCTGGACAACGAAGAAAATGAGGATATTCTCGA
AGACATCGTCCTCACCCTGACCCTGTTCGAAGACAGGGAAATGATAGAAG
AGCGCTTGAAAACCTATGCCCACCTCTTCGACGATAAAGTTATGAAGCAG
CTGAAGCGCAGGAGATACACAGGATGGGGAAGATTGTCAAGGAAGCTGAT
CAATGGAATTAGGGATAAACAGAGTGGCAAGACCATACTGGATTTCCTCA
AATCTGATGGCTTCGCCAATAGGAACTTCATGCAACTGATTCACGATGAC
TCTCTTACCTTCAAGGAGGACATTCAAAAGGCTCAGGTGAGCGGGCAGGG
AGACTCCCTTCATGAACACATCGCGAATTTGGCAGGTTCCCCCGCTATTA
AAAAGGGCATCCTTCAAACTGTCAAGGTGGTGGATGAATTGGTCAAGGTA
ATGGGCAGACATAAGCCAGAAAATATTGTGATCGAGATGGCCCGCGAAAA
CCAGACCACACAGAAGGGCCAGAAAAATAGTAGAGAGCGGATGAAGAGGA
TCGAGGAGGGCATCAAAGAGCTGGGATCTCAGATTCTCAAAGAACACCCC
GTAGAAAACACACAGCTGCAGAACGAAAAATTGTACTTGTACTATCTGCA
GAACGGCAGAGACATGTACGTCGACCAAGAACTTGATATTAATAGACTGT
CCGACTATGACGTAGACCATATCGTGCCCCAGTCCTTCCTGAAGGACGAC
TCCATTGATAACAAAGTCTTGACAAGAAGCGACAAGAACAGGGGTAAAAG
TGATAATGTGCCTAGCGAGGAGGTGGTGAAAAAAATGAAGAACTACTGGC
GACAGCTGCTTAATGCAAAGCTCATTACACAACGGAAGTTCGATAATCTG
ACGAAAGCAGAGAGAGGTGGCTTGTCTGAGTTGGACAAGGCAGGGTTTAT
TAAGCGGCAGCTGGTGGAAACTAGGCAGATCACAAAGCACGTGGCGCAGA
TTTTGGACAGCCGGATGAACACAAAATACGACGAAAATGATAAACTGATA
CGAGAGGTCAAAGTTATCACGCTGAAAAGCAAGCTGGTGTCCGATTTTCG
GAAAGACTTCCAGTTCTACAAAGTTCGCGAGATTAATAACTACCATCATG
CTCACGATGCGTACCTGAACGCTGTTGTCGGGACCGCCTTGATAAAGAAG
TACCCAAAGCTGGAATCCGAGTTCGTATACGGGGATTACAAAGTGTACGA
TGTGAGGAAAATGATAGCCAAGTCCGAGCAGGAGATTGGAAAGGCCACAG
CTAAGTACTTCTTTTATTCTAACATCATGAATTTTTTTAAGACGGAAATT
ACCCTGGCCAACGGAGAGATCAGAAAGCGGCCCCTTATAGAGACAAATGG
TGAAACAGGTGAAATCGTCTGGGATAAGGGCAGGGATTTCGCTACTGTGA
GGAAGGTGCTGAGTATGCCACAGGTAAATATCGTGAAAAAAACCGAAGTA
CAGACCGGAGGATTTTCCAAGGAAAGCATTTTGCCTAAAAGAAACTCAGA
CAAGCTCATCGCCCGCAAGAAAGATTGGGACCCTAAGAAATACGGGGGAT
TTGACTCACCCACCGTAGCCTATTCTGTGCTGGTGGTAGCTAAGGTGGAA
AAAGGAAAGTCTAAGAAGCTGAAGTCCGTGAAGGAACTCTTGGGAATCAC
TATCATGGAAAGATCATCCTTTGAAAAGAACCCTATCGATTTCCTGGAGG
CTAAGGGTTACAAGGAGGTCAAGAAAGACCTCATCATTAAACTGCCAAAA
TACTCTCTCTTCGAGCTGGAAAATGGCAGGAAGAGAATGTTGGCCAGCGC
CGGAGAGCTGCAAAAGGGAAACGAGCTTGCTCTGCCCTCCAAATATGTTA
ATTTTCTCTATCTCGCTTCCCACTATGAAAAGCTGAAAGGGTCTCCCGAA
GATAACGAGCAGAAGCAGCTGTTCGTCGAACAGCACAAGCACTATCTGGA
TGAAATAATCGAACAAATAAGCGAGTTCAGCAAAAGGGTTATCCTGGCGG
ATGCTAATTTGGACAAAGTACTGTCTGCTTATAACAAGCACCGGGATAAG
CCTATTAGGGAACAAGCCGAGAATATAATTCACCTCTTTACACTCACGAA
TCTCGGAGCCCCCGCCGCCTTCAAATACTTTGATACGACTATCGACCGGA
AACGGTATACCAGTACCAAAGAGGTCCTCGATGCCACCCTCATCCACCAG
TCAATTACTGGCCTGTACGAAACACGGATCGACCTCTCTCAACTGGGCGG
CGACTAG (SEQ ID NO: 3150)

[0395] Provided below is an exemplary codon optimized nucleic acid sequence encoding a Cas9 molecule including SEQ ID NO: 3172:

ATGGCTCCGAAGAAAAAGCGTAAAGTGGATAAAAAATACAGCATTGGTCT
GGACATTGGCACGAACTCAGTGGGTTGGGCGGTCATCACGGATGAATATA
AGGTCCCGTCAAAAAAGTTCAAAGTGCTGGGCAACACCGATCGCCATTCG
ATTAAAAAGAATCTGATCGGCGCGCTGCTGTTTGATAGCGGTGAAACCGC
GGAAGCAACGCGTCTGAAACGTACCGCACGTCGCCGTTACACGCGCCGTA
AAAATCGTATTCTGTATCTGCAGGAAATCTTTAGCAACGAAATGGCGAAA
GTTGATGACTCATTTTTCCACCGCCTGGAAGAATCGTTTCTGGTCGAAGA
AGACAAAAAGCATGAACGTCACCCGATTTTCGGTAATATCGTTGATGAAG
TCGCGTACCATGAAAAATATCCGACGATTTACCATCTGCGTAAAAAACTG
GTGGATTCAACCGACAAAGCCGATCTGCGCCTGATTTACCTGGCACTGGC
TCATATGATCAAATTTCGTGGCCACTTCCTGATTGAAGGTGACCTGAACC
CGGATAACTCTGACGTTGATAAGCTGTTCATCCAGCTGGTCCAAACCTAT
AATCAGCTGTTCGAAGAAAACCCGATCAATGCAAGTGGCGTTGATGCGAA
GGCCATTCTGTCCGCTCGCCTGAGTAAATCCCGCCGTCTGGAAAACCTGA
TTGCACAACTGCCGGGCGAAAAGAAAAACGGCCTGTTTGGTAATCTGATC
GCTCTGTCACTGGGTCTGACGCCGAACTTTAAATCGAATTTCGACCTGGC
AGAAGATGCTAAGCTGCAGCTGAGCAAAGATACCTACGATGACGATCTGG
ACAACCTGCTGGCGCAAATTGGTGACCAGTATGCCGACCTGTTTCTGGCG
GCCAAAAATCTGTCAGATGCCATTCTGCTGTCGGACATCCTGCGCGTGAA
CACCGAAATCACGAAAGCGCCGCTGTCAGCCTCGATGATTAAACGCTACG
ATGAACATCACCAGGACCTGACCCTGCTGAAAGCACTGGTTCGTCAGCAA
CTGCCGGAAAAGTACAAGGAAATTTTCTTTGACCAATCTAAGAACGGCTA
TGCAGGTTACATCGATGGCGGTGCTAGTCAGGAAGAATTCTACAAGTTCA
TCAAGCCGATCCTGGAAAAAATGGATGGCACGGAAGAACTGCTGGTGAAA
CTGAATCGTGAAGATCTGCTGCGTAAACAACGCACCTTTGACAACGGCAG
CATTCCGCATCAGATCCACCTGGGTGAACTGCATGCGATTCTGCGCCGTC
AGGAAGATTTTTATCCGTTCCTGAAAGACAACCGTGAAAAAATTGAAAAG
ATCCTGACGTTTCGCATCCCGTATTACGTTGGCCCGCTGGCGCGTGGTAA
TAGCCGCTTCGCCTGGATGACCCGCAAATCTGAAGAAACCATTACGCCGT
GGAACTTTGAAGAAGTGGTTGATAAAGGTGCAAGCGCTCAGTCTTTTATC
GAACGTATGACCAATTTCGATAAAAACCTGCCGAATGAAAAGGTCCTGCC
GAAACATAGCCTGCTGTATGAATACTTTACCGTGTACAACGAACTGACGA
AAGTGAAGTATGTTACCGAAGGCATGCGCAAACCGGCGTTTCTGTCTGGT
GAACAGAAAAAAGCCATTGTGGATCTGCTGTTCAAGACCAATCGTAAAGT
TACGGTCAAACAGCTGAAGGAAGATTACTTCAAAAAGATCGAAGAATTCG
ACAGCGTGGAAATTTCTGGCGTTGAAGATCGTTTCAACGCCAGTCTGGGT
ACCTATCATGACCTGCTGAAGATCATCAAGGACAAGGATTTTCTGGATAA
CGAAGAAAATGAAGACATTCTGGAAGATATCGTGCTGACCCTGACGCTGT
TCGAAGATCGTGAAATGATTGAAGAACGCCTGAAAACGTACGCACACCTG
TTTGACGATAAAGTTATGAAGCAGCTGAAACGCCGTCGCTATACCGGCTG
GGGTCGTCTGTCTCGCAAACTGATTAATGGCATCCGCGATAAGCAAAGTG
GTAAAACGATTCTGGATTTCCTGAAATCCGACGGCTTTGCCAACCGTAAT
TTCATGCAGCTGATCCATGACGATAGTCTGACCTTTAAGGAAGACATTCA
GAAAGCACAAGTGTCAGGCCAGGGTGATTCGCTGCATGAACACATTGCGA
ACCTGGCCGGCTCCCCGGCTATTAAAAAGGGTATCCTGCAGACCGTCAAA
GTCGTGGATGAACTGGTGAAGGTTATGGGCCGTCACAAACCGGAAAACAT
TGTGATCGAAATGGCGCGCGAAAATCAGACCACGCAAAAGGGTCAGAAAA
ACTCACGTGAACGCATGAAGCGCATTGAAGAAGGCATCAAAGAACTGGGT
TCGCAGATTCTGAAAGAACATCCGGTTGAAAACACCCAGCTGCAAAATGA
AAAACTGTACCTGTATTACCTGCAAAATGGCCGTGACATGTATGTCGATC
AGGAACTGGACATCAACCGCCTGAGCGACTATGATGTCGACCACATTGTG
CCGCAGAGCTTTCTGAAGGACGATTCTATCGATAATAAAGTGCTGACCCG
TTCTGATAAGAACCGCGGTAAAAGCGACAATGTTCCGTCTGAAGAAGTTG
TCAAAAAGATGAAGAACTACTGGCGTCAACTGCTGAATGCGAAGCTGATT
ACGCAGCGTAAATTCGATAACCTGACCAAGGCGGAACGCGGCGGTCTGAG
TGAACTGGATAAGGCCGGCTTTATCAAACGTCAACTGGTGGAAACCCGCC
AGATTACGAAACATGTTGCCCAGATCCTGGATTCCCGCATGAACACGAAA
TATGACGAAAATGATAAGCTGATTCGTGAAGTCAAAGTGATCACCCTGAA
GAGTAAGCTGGTGTCCGATTTCCGTAAGGACTTTCAGTTCTACAAAGTTC
GCGAAATTAACAATTACCATCACGCACACGATGCTTATCTGAATGCAGTG
GTTGGCACCGCTCTGATCAAAAAGTATCCGAAACTGGAAAGCGAATTTGT
GTATGGTGATTACAAAGTCTATGACGTGCGCAAGATGATTGCGAAAAGTG
AACAGGAAATCGGCAAGGCGACCGCCAAGTACTTTTTCTATTCCAACATC
ATGAACTTTTTCAAGACCGAAATCACGCTGGCAAATGGCGAAATTCGTAA
ACGCCCGCTGATCGAAACCAACGGCGAAACGGGTGAAATTGTGTGGGATA
AAGGTCGTGACTTCGCGACCGTTCGCAAAGTCCTGTCAATGCCGCAAGTG
AATATCGTTAAAAAGACCGAAGTTCAGACGGGCGGTTTTAGTAAAGAATC
CATCCTGCCGAAGCGTAACTCGGATAAACTGATTGCGCGCAAAAAGGATT
GGGACCCGAAAAAGTACGGCGGTTTTGATAGTCCGACCGTTGCATATTCC
GTCCTGGTCGTGGCTAAAGTTGAAAAAGGCAAGAGTAAAAAGCTGAAGTC
CGTCAAAGAACTGCTGGGTATTACCATCATGGAACGTAGCTCTTTTGAAA
AGAACCCGATTGACTTCCTGGAAGCCAAGGGCTACAAAGAAGTGAAAAAG
GATCTGATTATCAAGCTGCCGAAATATTCGCTGTTCGAACTGGAAAACGG
TCGTAAACGCATGCTGGCAAGCGCTGGCGAACTGCAGAAGGGTAATGAAC
TGGCACTGCCGTCTAAATATGTGAACTTTCTGTACCTGGCTAGCCATTAT
GAAAAACTGAAGGGTTCTCCGGAAGATAACGAACAGAAGCAACTGTTCGT
TGAACAACATAAACACTACCTGGATGAAATCATCGAACAGATCTCAGAAT
TCTCGAAACGCGTCATTCTGGCGGATGCCAATCTGGACAAAGTGCTGAGC
GCGTATAACAAGCATCGTGATAAACCGATTCGCGAACAGGCCGAAAATAT
TATCCACCTGTTTACCCTGACGAACCTGGGCGCACCGGCAGCTTTTAAAT
ACTTCGATACCACGATCGACCGTAAGCGCTATACCAGCACGAAAGAAGTT
CTGGATGCTACCCTGATTCATCAGTCAATCACCGGTCTGTATGAAACGCG
TATTGACCTGAGCCAACTGGGCGGTGATAGCCGTGCCGACCATCACCATC
ACCATCACTAATAG (SEQ ID NO: 3151)

[0396] If the above Cas9 sequences are fused with a peptide or polypeptide at the C-terminus (e.g., an inactive Cas9 fused with a transcription repressor at the C-terminus), it is understood that the stop codon will be removed.

[0397] Also provided herein are nucleic acids, vectors and cells for production of a Cas9 molecule, for example a Cas9 molecule described herein. The recombaint production of polypeptide molecules can be accomplished using techniques known to a skilled artisan. Described herein are molecules and methods for the recombinant production of polypeptide molecules, such as Cas9 molecules, e.g., as described herein. As used in connection herewith, “recombinant” molecules and production includes all polypeptides (e.g., Cas9 molecules, for example as described herein) that are prepared, expressed, created or isolated by recombinant means, such as polypeptides isolated from an animal (e.g., a mouse) that is transgenic or transchromosomal for nucleic acid encoding the molecule of interest, a hybridoma prepared therefrom, molecules isolated from a host cell transformed to express the molecule, e.g., from a transfectoma, molecules isolated from a recombinant, combinatorial library, and molecules prepared, expressed, created or isolated by any other means that involve splicing of all or a portion of a gene encoding the molecule (or potion thereof) to other DNA sequences. Recombinant production may be from a host cell, for example, a host cell comprising nucleic acid encoding a molecule described herein, e.g., a Cas9 molecule, e.g., a Cas9 molecule described herein.

[0398] Provided herein are nucleic acid molecules encoding a molecule (e.g., Cas9 molecule and/or gRNA molecule), e.g., as described herein. Specifically provided are nucleic acid molecules comprising sequence encoding any one of SEQ ID NO: 3161 to SEQ ID NO: 3172, or encoding a fragment of any of SEQ ID NO: 3161 to SEQ ID NO: 3172, or encoding a polypeptide comprising at least 90%, at least 91%, at least 92%, at least 93%, at least 94%, at least 95%, at least 96%, at least 97%, at least 98%, or at least 99% sequence homology to any of SEQ ID NO: 3161 to SEQ ID NO: 3172.

[0399] Provided herein are vectors, e.g., as described herein, comprising any of the above-described nucleic acid molecules. In embodiments, said nucleic acid molecules are operably linked to a promoter, for example a promoter operable in the host cell into which the vector is introduced.

[0400] Provided herein are host cells comprising one or more nucleic acid molecules and/or vectors described herein. In embodiments, the host cell is a prokaryotic host cell. In embodiments, the host cell is a eukaryotic host cell. In embodiments, the host cell is a yeast or e. coli cell. In embodiments, the host cell is a mammalian cell, e.g., a human cell. Such host cells may be used for the production of a recombinant molecule described herein, e.g., a Cas9 or gRNA molecule, e.g., as described herein.

### Other Cas Molecules

[0401] Any Cas9 variants or Class II CRISPR endonuclease can be used in any compositions and methods described herein.

[0402] The term “Cas9 variant” refers to proteins that have at least 80%, 85%, 90%, 95%, 96%, 97%, 98%, 99% or 100% amino acid sequence identity across the whole sequence or a functional portion of the sequence (e.g. a 50, 100, 150 or 200 continuous amino acid portion) compared to wild-type Cas9 protein and have one or more mutations that increase its binding specificity to PAM compared to wild-type Cas9 protein. Exemplary Cas9 variants are listed in the Table 6 below.

TABLE 6

| | | |
|---|---|---|
| Cas9 Variants | PAM domains | References |
| Strep pyogenes (Sp) Cas9 | NGG | Hsu et al. 2014 Cell |
| Staph aureus (Sa) Cas9 | NNGRRT or NNGRR NNGGGT, NNGAAT, NNGAGT (Zetsche) | Ran et al. 2015 Nature |
| SpCas9 VQR mutant (D1135V, R1335Q, T1337R) | NGAG>NGAT=NGAA>NGACNGCG | Kleinstiver et al. 2015 Nature |
| SpCas9 VRER mutant (D1135V/G1218R/R1335E/T1337R) | NGCG | Kleinstiver et al. 2015 Nature |
| SpCas9 D1135E | NGG, greater fidelity, less cutting at NAG and NGA sites | Kleinstiver et al. 2015 Nature |
| eSpCas9 1.1 mutant (K848A/K1003A/R1060A) | NGG | Slaymaker et al. Science 2015 |
| SpCas9 HF1 (Q695A, Q926A, N497A, R661A) | NGG | Kleinstiver et al. 2016 Nature |
| AsCpfl | TTTN (5′ of sgRNA) | Zetsche et al. 2015 Cell |

[0403] A “Cpfl” or “ Cpfl protein” or “Cas12a” as referred to herein includes any of the recombinant or naturally-occurring forms of the Cpfl (CxxC finger protein 1) endonuclease or variants or homologs thereof that maintain Cpfl endonuclease enzyme activity (e.g. within at least 50%, 80%, 90%, 95%, 96%, 97%, 98%, 99% or 100% activity compared to Cpfl). In some aspects, the variants or homologs have at least 90%, 95%, 96%, 97%, 98%, 99% or 100% amino acid sequence identity across the whole sequence or a portion of the sequence (e.g. a 50, 100, 150 or 200 continuous amino acid portion) compared to a naturally occurring Cpfl protein. In embodiments, the Cpfl protein is substantially identical to the protein identified by the UniProt reference number Q9P0U4 or a variant or homolog having substantial identity thereto.

[0404] The term “Class II CRISPR endonuclease” refers to endonucleases that have similar endonuclease activity as Cas9 and participate in a Class II CRISPR system. An example Class II CRISPR system is the type II CRISPR locus from Streptococcuspyogenes SF370, which contains a cluster of four genes Cas9, Cas1, Cas2, and Csn1, as well as two non-coding RNA elements, tracrRNA and a characteristic array of repetitive sequences (direct repeats) interspaced by short stretches of non-repetitive sequences (spacers, about 30 bp each). In this system, targeted DNA double-strand break (DSB) may generated in four sequential steps. First, two non-coding RNAs, the pre-crRNA array and tracrRNA, may be transcribed from the CRISPR locus. Second, tracrRNA may hybridize to the direct repeats of pre-crRNA, which is then processed into mature crRNAs containing individual spacer sequences. Third, the mature crRNA:tracrRNA complex may direct Cas9 to the DNA target consisting of the protospacer and the corresponding PAM via heteroduplex formation between the spacer region of the crRNA and the protospacer DNA. Finally, Cas9 may mediate cleavage of target DNA upstream of PAM to create a DSB within the protospacer.

### V. Functional Analysis of Candidate Molecules

[0405] Candidate Cas9 molecules, candidate gRNA molecules, candidate Cas9 molecule/gRNA molecule complexes, can be evaluated by art-known methods or as described herein. For example, exemplary methods for evaluating the endonuclease activity of Cas9 molecule are described, e.g., in Jinek el al., SCIENCE 2012; 337(6096):8 16-821.

### VI. Template Nucleic Acids (For Introduction of Nucleic Acids)

[0406] The term “template nucleic acid” or “donor template” as used herein refers to a nucleic acid to be inserted at or near a target sequence that has been modified, e.g., cleaved, by a CRISPR system of the present invention. In an embodiment, nucleic acid sequence at or near the target sequence is modified to have some or all of the sequence of the template nucleic acid, typically at or near cleavage site(s). In an embodiment, the template nucleic acid is single stranded. In an alternate embodiment, the template nucleic acid is double stranded. In an embodiment, the template nucleic acid is DNA, e.g., double stranded DNA. In an alternate embodiment, the template nucleic acid is single stranded DNA.

[0407] In embodiments, the template nucleic acid comprises sequence encoding a globin protein, e.g., a beta globin, e.g., comprises a beta globin gene. In an embodiment, the beta globin encoded by the nucleic acid comprises one or more mutations, e.g., anti-sickling mutations. In an embodiment, the beta globin encoded by the nucleic acid comprises the mutation T87Q. In an embodiment, the beta globin encoded by the nucleic acid comprises the mutation G16D. In an embodiment, the beta globin encoded by the nucleic acid comprises the mutation E22A. In an embodiment, the beta globin gene comprises the mutations G16D, E22A and T87Q. In embodiments, the template nucleic acid further comprises one or more regulatory elements, e.g., a promoter (e.g., a human beta globin promoter), a 3′ enhancer, and/or at least a portion of a globin locus control regoin (e.g., one or more DNAseI hypersensitivity sites (e.g., HS2, HS3 and/or HS4 of the human globin locus)).

[0408] In other embodiments, the template nucleic acid comprises sequence encoding a gamma globin, e.g., comprises a gamma globin gene. In embodiments, the template nucleic acid comprises sequence encoding more than one copy of a gamma globin protein, e.g., comprises two or more, e.g., two, gamma globin gene sequences. In embodiments, the template nucleic acid further comprises one or more regulatory elements, e.g., a promotor and/or enhancer.

[0409] In an embodiment, the template nucleic acid alters the structure of the target position by participating in a homology directed repair event. In an embodiment, the template nucleic acid alters the sequence of the target position. In an embodiment, the template nucleic acid results in the incorporation of a modified, or non-naturally occurring base into the target nucleic acid.

[0410] Mutations in a gene or pathway described herein may be corrected using one of the approaches discussed herein. In an embodiment, a mutation in a gene or pathway described herein is corrected by homology directed repair (HDR) using a template nucleic acid. In an embodiment, a mutation in a gene or pathway described herein is corrected by homologous recombination (HR) using a template nucleic acid. In an embodiment, a mutation in a gene or pathway described herein is corrected by Non-Homologous End Joining (NHEJ) repair using a template nucleic acid. In other embodiments, nucleic acid encoding molecules of interest may be inserted at or near a site modified by a CRISPR system of the present invention. In embodiments, the template nucleic acid comprises regulatory elements, e.g., one or more promotors and/or enhancers, operably linked to the nucleic acid sequence encoding a molecule of interest, e.g., as described herein.

### HDR or HR Repair and Template Nucleic Acids

[0411] As described herein, nuclease-induced homology directed repair (HDR) or homologous recombination (HR) can be used to alter a target sequence and correct (e.g., repair or edit) a mutation in the genome. While not wishing to be bound by theory, it is believed that alteration of the target sequence occurs by repair based on a donor template or template nucleic acid. For example, the donor template or the template nucleic acid provides for alteration of the target sequence. It is contemplated that a plasmid donor or linear double stranded template can be used as a template for homologous recombination. It is further contemplated that a single stranded donor template can be used as a template for alteration of the target sequence by alternate methods of homology directed repair (e.g., single strand annealing) between the target sequence and the donor template. Donor template-effected alteration of a target sequence may depend on cleavage by a Cas9 molecule. Cleavage by Cas9 can comprise a double strand break, one single strand break, or two single strand breaks.

[0412] In an embodiment, a mutation can be corrected by either a single double-strand break or two single strand breaks. In an embodiment, a mutation can be corrected by providing a template and a CRISPR/Cas9 system that creates (1) one double strand break, (2) two single strand breaks, (3) two double stranded breaks with a break occurring on each side of the target sequence, (4) one double stranded break and two single strand breaks with the double strand break and two single strand breaks occurring on each side of the target sequence, (5) four single stranded breaks with a pair of single stranded breaks occurring on each side of the target sequence, or (6) one single strand break.

### Double Strand Break Mediated Correction

[0413] In an embodiment, double strand cleavage is effected by a Cas9 molecule having cleavage activity associated with an HNH-like domain and cleavage activity associated with a RuvC-like domain, e.g., an N-terminal RuvC-like domain, e.g., a wild type Cas9. Such embodiments require only a single gRNA.

### Single Strand Break Mediated Correction

[0414] In other embodiments, two single strand breaks, or nicks, are effected by a Cas9 molecule having nickase activity, e.g., cleavage activity associated with an HNH-like domain or cleavage activity associated with an N-terminal RuvC-like domain. Such embodiments require two gRNAs, one for placement of each single strand break. In an embodiment, the Cas9 molecule having nickase activity cleaves the strand to which the gRNA hybridizes, but not the strand that is complementary to the strand to which the gRNA hybridizes. In an embodiment, the Cas9 molecule having nickase activity does not cleave the strand to which the gRNA hybridizes, but rather cleaves the strand that is complementary to the strand to which the gRNA hybridizes.

[0415] In an embodiment, the nickase has HNH activity, e.g., a Cas9 molecule having the RuvC activity inactivated, e.g., a Cas9 molecule having a mutation at D10, e.g., the D10A mutation. D10A inactivates RuvC; therefore, the Cas9 nickase has (only) HN H activity and will cut on the strand to which the gRNA hybridizes (e.g., the complementary strand, which does not have the NGG PAM on it). In other embodiments, a Cas9 molecule having an H840, e.g., an H840A, mutation can be used as a nickase. H840A inactivates HNH; therefore, the Cas9 nickase has (only) RuvC activity and cuts on the non-complementary strand (e.g., the strand that has the NGG PAM and whose sequence is identical to the gRNA).

[0416] In an embodiment, in which a nickase and two gRNAs are used to position two single strand nicks, one nick is on the + strand and one nick is on the - strand of the target nucleic acid. The PAMs are outwardly facing. The gRNAs can be selected such that the gRNAs are separated by, from about 0-50, 0- 100, or 0-200 nucleotides. In an embodiment, there is no overlap between the target sequence that is complementary to the targeting domains of the two gRNAs. In an embodiment, the gRNAs do not overlap and are separated by as much as 50, 100, or 200 nucleotides. In an embodiment, the use of two gRNAs can increase specificity, e.g., by decreasing off-target binding (Ran el al., CELL 2013).

[0417] In an embodiment, a single nick can be used to induce HDR. It is contemplated herein that a single nick can be used to increase the ratio of HDR, HR or NHEJ at a given cleavage site.

[0418] Placement of the double strand break or a single strand break relative to target position

[0419] The double strand break or single strand break in one of the strands should be sufficiently close to target position such that correction occurs. In an embodiment, the distance is not more than 50, 100, 200, 300, 350 or 400 nucleotides. While not wishing to be bound by theory, it is believed that the break should be sufficiently close to target position such that the break is within the region that is subject to exonuclease-mediated removal during end resection. If the distance between the target position and a break is too great, the mutation may not be included in the end resection and, therefore, may not be corrected, as donor sequence may only be used to correct sequence within the end resection region.

[0420] In an embodiment, in which a gRNA (unimolecular (or chimeric) or modular gRNA) and Cas9 nuclease induce a double strand break for the purpose of inducing HDR- or HR-mediated correction, the cleavage site is between 0-200 bp (e.g., 0 to 175, 0 to 150, 0 to 125, 0 to 100, 0 to 75, 0 to 50, 0 to 25, 25 to 200, 25 to 175, 25 to 150, 25 to 125, 25 to 100, 25 to 75, 25 to 50, 50 to 200, 50 to 175, 50 to 150, 50 to 125, 50 to 100, 50 to 75, 75 to 200, 75 to 175, 75 to 150, 75 to 1 25, 75 to 100 bp) away from the target position. In an embodiment, the cleavage site is between 0- 100 bp (e.g., 0 to 75, 0 to 50, 0 to 25, 25 to 100, 25 to 75, 25 to 50, 50 to 100, 50 to 75 or 75 to 100 bp) away from the target position.

[0421] In an embodiment, in which two gRNAs (independently, unimolecular (or chimeric) or modular gRNA) complexing with Cas9 nickases induce two single strand breaks for the purpose of inducing HDR-mediated correction, the closer nick is between 0-200 bp (e.g., 0 to 175, 0 to 150, 0 to 125, 0 to 100, 0 to 75, 0 to 50, 0 to 25, 25 to 200, 25 to 175, 25 to 150, 25 to 125, 25 to 100, 25 to 75, 25 to 50, 50 to 200, 50 to 175, 50 to 150, 50 to 125, 50 to 100, 50 to 75, 75 to 200, 75 to 175, 75 to 150, 75 to 125, 75 to 100 bp) away from the target position and the two nicks will ideally be within 25-55 bp of each other (e.g., 25 to 50, 25 to 45, 25 to 40, 25 to 35, 25 to 30, 30 to 55, 30 to 50, 30 to 45, 30 to 40, 30 to 35, 35 to 55, 35 to 50, 35 to 45, 35 to 40, 40 to 55, 40 to 50, 40 to 45 bp) and no more than 100 bp away from each other (e.g., no more than 90, 80, 70, 60, 50, 40, 30, 20, 10 or 5 bp away from each other). In an embodiment, the cleavage site is between 0- 100 bp (e.g., 0 to 75, 0 to 50, 0 to 25, 25 to 100, 25 to 75, 25 to 50, 50 to 100, 50 to 75 or 75 to 100 bp) away from the target position.

[0422] In one embodiment, two gRNAs, e.g., independently, unimolecular (or chimeric) or modular gRNA, are configured to position a double-strand break on both sides of a target position. In an alternate embodiment, three gRNAs, e.g., independently, unimolecular (or chimeric) or modular gRNA, are configured to position a double strand break (i.e., one gRNA complexes with a Cas9 nuclease) and two single strand breaks or paired single stranded breaks (i.e., two gRNAs complex with Cas9 nickases) on either side of the target position (e.g., the first gRNA is used to target upstream (i.e., 5′) of the target positionand the second gRNA is used to target downstream (i.e., 3′) of the target position). In another embodiment, four gRNAs, e.g., independently, unimolecular (or chimeric) or modular gRNA, are configured to generate two pairs of single stranded breaks (i.e., two pairs of two gRNAs complex with Cas9 nickases) on either side of the target position (e.g., the first gRNA is used to target upstream (i.e., 5′) of the target position and the second gRNA is used to target downstream (i.e., 3′) of the target position). The double strand break(s) or the closer of the two single strand nicks in a pair will ideally be within 0-500 bp of the target position (e.g., no more than 450, 400, 350, 300, 250, 200, 150, 100, 50 or 25 bp from the target position). When nickases are used, the two nicks in a pair are within 25-55 bp of each other (e.g., between 25 to 50, 25 to 45, 25 to 40, 25 to 35, 25 to 30, 50 to 55, 45 to 55, 40 to 55, 35 to 55, 30 to 55, 30 to 50, 35. to 50, 40 to 50, 45 to 50, 35 to 45, or 40 to 45 bp) and no more than 100 bp away from each other (e.g., no more than 90, 80, 70, 60, 50, 40, 30, 20 or 10 bp).

[0423] In one embodiment, two gRNAs, e.g., independently, unimolecular (or chimeric) or modular gRNA, are configured to position a double-strand break on both sides of a target position. In an alternate embodiment, three gRNAs, e.g., independently, unimolecular (or chimeric) or modular gRNA, are configured to position a double strand break (i.e., one gRNA complexes with a Cas9 nuclease) and two single strand breaks or paired single stranded breaks (i.e., two gRNAs complex with Cas9 nickases) on two target sequences (e.g., the first gRNA is used to target an upstream (i.e., 5′) target sequence and the second gRNA is used to target a downstream (i.e., 3′) target sequence of an insertion site. In another embodiment, four gRNAs, e.g., independently, unimolecular (or chimeric) or modular gRNA, are configured to generate two pairs of single stranded breaks (i.e., two pairs of two gRNAs complex with Cas9 nickases) on either side of an insertion site (e.g., the first gRNA is used to target an upstream (i.e., 5′) target sequence described herein, and the second gRNA is used to target a downstream (i.e., 3′) target sequence described herein). The double strand break(s) or the closer of the two single strand nicks in a pair will ideally be within 0-500 bp of the target position (e.g., no more than 450, 400, 350, 300, 250, 200, 150, 100, 50 or 25 bp from the target position). When nickases are used, the two nicks in a pair are within 25-55 bp of each other (e.g., between 25 to 50, 25 to 45, 25 to 40, 25 to 35, 25 to 30, 50 to 55, 45 to 55, 40 to 55, 35 to 55, 30 to 55, 30 to 50, 35 to 50, 40 to 50, 45 to 50, 35 to 45, or 40 to 45 bp) and no more than 100 bp away from each other (e.g., no more than 90, 80, 70, 60, 50, 40, 30, 20 or 10 bp).

### Length of the Homology Arms

[0424] The homology arm should extend at least as far as the region in which end resection may occur, e.g., in order to allow the resected single stranded overhang to find a complementary region within the donor template. The overall length could be limited by parameters such as plasmid size or viral packaging limits. In an embodiment, a homology arm does not extend into repeated elements, e.g., ALU repeats, LINE repeats. A template may have two homology arms of the same or different lengths.

[0425] Exemplary homology arm lengths include at least 25, 50, 100, 250, 500, 750 or 1000 nucleotides.

[0426] Target position, as used herein, refers to a site on a target nucleic acid (e.g., the chromosome) that is modified by a Cas9 molecule-dependent process. For example, the target position can be a modified Cas9 molecule cleavage of the target nucleic acid and template nucleic acid directed modification, e.g., correction, of the target position. In an embodiment, a target position can be a site between two nucleotides, e.g., adjacent nucleotides, on the target nucleic acid into which one or more nucleotides is added. The target position may comprise one or more nucleotides that are altered, e.g., corrected, by a template nucleic acid. In an embodiment, the target position is within a target sequence (e.g., the sequence to which the gRN A binds). In an embodiment, a target position is upstream or downstream of a target sequence (e.g., the sequence to which the gRNA binds).

[0427] Typically, the template sequence undergoes a breakage mediated or catalyzed recombination with the target sequence. In an embodiment, the template nucleic acid includes sequence that corresponds to a site on the target sequence that is cleaved by a Cas9 mediated cleavage event. In an embodiment, the template nucleic acid includes sequence that corresponds to both, a first site on the target sequence that is cleaved in a first Cas9 mediated event, and a second site on the target sequence that is cleaved in a second Cas9 mediated event.

[0428] In an embodiment, the template nucleic acid can include sequence which results in an alteration in the coding sequence of a translated sequence, e.g., one which results in the substitution of one amino acid for another in a protein product, e.g., transforming a mutant allele into a wild type allele, transforming a wild type allele into a mutant allele, and/or introducing a stop codon, insertion of an amino acid residue, deletion of an amino acid residue, or a nonsense mutation.

[0429] In other embodiments, the template nucleic acid can include sequence which results in an alteration in a non-coding sequence, e.g., an alteration in an exon or in a 5′ or 3′ non-translated or non-transcribed region. Such alterations include an alteration in a control element, e.g., a promoter, enhancer, and an alteration in a cis-acting or trans-acting control element.

[0430] The template nucleic acid can include sequence which, when integrated, results in:
[0431] decreasing the activity of a positive control element;
[0432] increasing the activity of a positive control element;
[0433] decreasing the activity of a negative control element;
[0434] increasing the activity of a negative control element;
[0435] decreasing the expression of a gene;
[0436] increasing the expression of a gene;
[0437] increasing resistance to a disorder or disease;
[0438] increasing resistance to viral entry;
[0439] correcting a mutation or altering an unwanted amino acid residue;
[0440] conferring, increasing, abolishing or decreasing a biological property of a gene product, e.g., increasing the enzymatic activity of an enzyme, or increasing the ability of a gene product to interact with another molecule.

[0441] The template nucleic acid can include sequence which results in: a change in sequence of 1, 2, 3, 4, 5, 6, 7, 8, 9, 10, 11, 12 or more nucleotides of the target sequence.

[0442] In an embodiment, the template nucleic acid is 20+/- 10, 30+/- 10, 40+/- 10, 50+/- 10, 60+/- 10, 70+/-10, 80+/- 10, 90+/- 10, 100+/- 10, 1 10+/- 10, 120+/- 10, 130+/- 10, 140+/- 10, 150+/- 10, 160+/- 10, 170+/- 10, 1 80+/- 10, 190+/- 10, 200+/- 10, 210+/-10, 220+/- 10, 200-300, 300-400, 400-500, 500-600, 600-700, 700-800, 800-900, 900-1000, 1000-2000, 2000-3000 or more than 3000 nucleotides in length.

[0443] A template nucleic acid comprises the following components:

[0444] [5′ homology arm]-[insertion sequence]-[3′ homology arm].

[0445] The homology arms provide for recombination into the chromosome, which can replace the undesired element, e.g., a mutation or signature, with the replacement sequence. In an embodiment, the homology arms flank the most distal cleavage sites.

[0446] In an embodiment, the 3′ end of the 5′ homology arm is the position next to the 5′ end of the replacement sequence. In an embodiment, the 5′ homology arm can extend at least 10, 20, 30, 40, 50, 60, 70, 80, 90, 100, 120, 150, 180, 200, 300, 400, 500, 600, 700, 800, 900, 1000, 1500, or 2000 nucleotides 5′ from the 5′ end of the replacement sequence.

[0447] In an embodiment, the 5′ end of the 3′ homology arm is the position next to the 3′ end of the replacement sequence. In an embodiment, the 3′ homology arm can extend at least 10, 20, 30, 40, 50, 60, 70, 80, 90, 100, 120, 150, 180, 200, 300, 400, 500, 600, 700, 800, 900, 1000, 1500, or 2000 nucleotides 3′ from the 3′ end of the replacement sequence.

[0448] It is contemplated herein that one or both homology arms may be shortened to avoid including certain sequence repeat elements, e.g., Alu repeats, LINE elements. For example, a 5′ homology arm may be shortened to avoid a sequence repeat element. In other embodiments, a 3′ homology arm may be shortened to avoid a sequence repeat element. In some embodiments, both the 5′ and the 3′ homology arms may be shortened to avoid including certain sequence repeat elements.

[0449] It is contemplated herein that template nucleic acids for correcting a mutation may designed for use as a single-stranded oligonucleotide (ssODN). When using a ssODN, 5′ and 3′ homology arms may range up to about 200 base pairs (bp) in length, e.g., at least 25, 50, 75, 100, 125, 150, 175, or 200 bp in length. Longer homology arms are also contemplated for ssODNs as improvements in oligonucleotide synthesis continue to be made.

### NHEJ Approaches for Gene Targeting

[0450] As described herein, nuclease-induced non-homologous end-joining (NHEJ) can be used to target gene-specific knockouts. Nuclease-induced NHEJ can also be used to remove (e.g., delete) sequence in a gene of interest.

[0451] While not wishing to be bound by theory, it is believed that, in an embodiment, the genomic alterations associated with the methods described herein rely on nuclease-induced NHEJ and the error-prone nature of the NHEJ repair pathway. NHEJ repairs a double-strand break in the DNA by joining together the two ends; however, generally, the original sequence is restored only if two compatible ends, exactly as they were formed by the double-strand break, are perfectly ligated. The DNA ends of the double-strand break are frequently the subject of enzymatic processing, resulting in the addition or removal of nucleotides, at one or both strands, prior to rejoining of the ends. This results in the presence of insertion and/or deletion (indel) mutations in the DNA sequence at the site of the NHEJ repair. Two-thirds of these mutations may alter the reading frame and, therefore, produce a non-functional protein. Additionally, mutations that maintain the reading frame, but which insert or delete a significant amount of sequence, can destroy functionality of the protein. This is locus dependent as mutations in critical functional domains are likely less tolerable than mutations in non-critical regions of the protein.

[0452] The indel mutations generated by NHEJ are unpredictable in nature; however, at a given break site certain indel sequences are favored and are over represented in the population. The lengths of deletions can vary widely; most commonly in the 1-50 bp range, but they can easily reach greater than 100-200 bp. Insertions tend to be shorter and often include short duplications of the sequence immediately surrounding the break site. However, it is possible to obtain large insertions, and in these cases, the inserted sequence has often been traced to other regions of the genome or to plasmid DNA present in the cells.

[0453] Because NHEJ is a mutagenic process, it can also be used to delete small sequence motifs as long as the generation of a specific final sequence is not required. If a double-strand break is targeted near to a short target sequence, the deletion mutations caused by the NHEJ repair often span, and therefore remove, the unwanted nucleotides. For the deletion of larger DNA segments, introducing two double-strand breaks, one on each side of the sequence, can result in NHEJ between the ends with removal of the entire intervening sequence. Both of these approaches can be used to delete specific DNA sequences; however, the error-prone nature of NHEJ may still produce indel mutations at the site of repair.

[0454] Both double strand cleaving Cas9 molecules and single strand, or nickase, Cas9 molecules can be used in the methods and compositions described herein to generate NHEJ- mediated indels. NHEJ-mediated indels targeted to the gene, e.g., a coding region, e.g., an early coding region of a gene of interest can be used to knockout (i.e., eliminate expression of) a gene of interest. For example, early coding region of a gene of interest includes sequence immediately following a transcription start site, within a first exon of the coding sequence, or within 500 bp of the transcription start site (e.g., less than 500, 450, 400, 350, 300, 250, 200, 150, 100 or 50 bp).

[0455] Placement of double strand or single strand breaks relative to the target position

[0456] In an embodiment, in which a gRNA and Cas9 nuclease generate a double strand break for the purpose of inducing NHEJ-mediated indels, a gRNA, e.g., a unimolecular (or chimeric) or modular gRNA molecule, is configured to position one double-strand break in close proximity to a nucleotide of the target position. In an embodiment, the cleavage site is between 0-500 bp away from the target position (e.g., less than 500, 400, 300, 200, 100, 50, 40, 30, 25, 20, 15, 10, 9, 8, 7, 6, 5, 4, 3, 2 or 1 bp from the target position).

[0457] In an embodiment, in which two gRNAs complexing with Cas9 nickases induce two single strand breaks for the puipose of inducing NHEJ-mediated indels, two gRNAs, e.g., independently, unimolecular (or chimeric) or modular gRNA, are configured to position two single-strand breaks to provide for NHEJ repair a nucleotide of the target position. In an embodiment, the gRNAs are configured to position cuts at the same position, or within a few nucleotides of one another, on different strands, essentially mimicking a double strand break. In an embodiment, the closer nick is between 0-30 bp away from the target position (e.g., less than 30, 25, 20, 1, 10, 9, 8, 7, 6, 5, 4, 3, 2 or 1 bp from the target position), and the two nicks are within 25-55 bp of each other (e.g., between 25 to 50, 25 to 45, 25 to 40, 25 to 35, 25 to 30, 50 to 55, 45 to 55, 40 to 55, 35 to 55, 30 to 55, 30 to 50, 35 to 50, 40 to 50, 45 to 50, 35 to 45, or 40 to 45 bp) and no more than 100 bp away from each other (e.g., no more than 90, 80, 70, 60, 50, 40, 30, 20 or 10 bp). In an embodiment, the gRNAs are configured to place a single strand break on either side of a nucleotide of the target position.

[0458] Both double strand cleaving Cas9 molecules and single strand, or nickase, Cas9 molecules can be used in the methods and compositions described herein to generate breaks both sides of a target position. Double strand or paired single strand breaks may be generated on both sides of a target position to remove the nucleic acid sequence between the two cuts (e.g., the region between the two breaks is deleted). In one embodiment, two gRNAs, e.g., independently, unimolecular (or chimeric) or modular gRNA, are configured to position a double-strand break on both sides of a target position (e.g., the first gRNA is used to target upstream (i.e., 5′) of the mutation in a gene or pathway described herein, and the second gRNA is used to target downstream (i.e., 3′) of the mutation in a gene or pathway described herein). In an alternate embodiment, three gRNAs, e.g., independently, unimolecular (or chimeric) or modular gRNA, are configured to position a double strand break (i.e., one gRNA complexes with a Cas9 nuclease) and two single strand breaks or paired single stranded breaks (i.e., two gRNAs complex with Cas9 nickases) on either side of a target position (e.g., the fu st gRNA is used to target upstream (i.e., 5′) of the mutation in a gene or pathway described herein, and the second gRNA is used to target downstream (i.e., 3′) of the mutation in a gene or pathway described herein). In another embodiment, four gRNAs, e.g., independently, unimolecular (or chimeric) or modular gRNA, are configured to generate two pairs of single stranded breaks (i.e., two pairs of two gRNAs complex with Cas9 nickases) on either side of the target position (e.g., the first gRNA is used to target upstream (i.e., 5′) of the mutation in a gene or pathway described herein, and the second gRNA is used to target downstream (i.e., 3′) of the mutation in a gene or pathway described herein). The double strand break(s) or the closer of the two single strand nicks in a pair will ideally be within 0-500 bp of the target position (e.g., no more than 450, 400, 350, 300, 250, 200, 150, 100, 50 or 25 bp from the target position). When nickases are used, the two nicks in a pair are within 25-55 bp of each other (e.g., between 25 to 50, 25 to 45, 25 to 40, 25 to 35, 25 to 30, 50 to 55, 45 to 55, 40 to 55, 35 to 55, 30 to 55, 30 to 50, 35 to 50, 40 to 50, 45 to 50, 35 to 45, or 40 to 45 bp) and no more than 100 bp away from each other (e.g., no more than 90, 80, 70, 60, 50, 40, 30, 20 or 10 bp).

[0459] In other embodiments, the insertion of template nucleic acid may be mediated by microhomology end joining (MMEJ). See, e.g., Saksuma et al., “MMEJ-assisted gene knock-in using TALENs and CRISPR-Cas9 with the PITCh systems.” Nature Protocols 11, 118-133 (2016) doi:10.1038/nprot.2015.140 Published online 17 Dec. 2015, the contents of which are incorporated by reference in their entirety.

### VII. Systems Comprising More Than One gRNA Molecule

[0460] While not intending to be bound by theory, it has been surprisingly shown herein that the targeting of two target sequences (e.g., by two gRNA molecule/Cas9 molecule complexes which each induce a single- or double-strand break at or near their respective target sequences) located in close proximity on a continuous nucleic acid induces excision (e.g., deletion) of the nucleic acid sequence (or at least 80%, 85%, 90%, 95%, 96%, 97%, 98%, 99% of the nucleic acid sequence) located between the two target sequences. In some aspects, the present disclosure provides for the use of two or more gRNA molecules that comprise targeting domains targeting target sequences in close proximity on a continuous nucleic acid, e.g., a chromosome, e.g., a gene or gene locus, including its introns, exons and regulatory elements. The use may be, for example, by introduction of the two or more gRNA molecules, together with one or more Cas9 molecules (or nucleic acid encoding the two or more gRNA molecules and/or the one or more Cas9 molecules) into a cell.

[0461] In some aspects, the target sequences of the two or more gRNA molecules are located at least 5, 6, 7, 8, 9, 10, 20, 30, 40, 50, 60, 70, 80, 90, 100, 200, 300, 400, 500, 600, 700, 800, 900, 1000, 2000, 3000, 4000, 5000, 6000, 7000, 8000, 9000, 10,000, 11,000, 12,000, 13,000, 14,000, or 15,000 nucleotides apart on a continuous nucleic acid, but not more than 25,000 nucleotides apart on a continuous nucleic acid. In embodiments, the target sequences are located between about 4000 and about 6000 nucleotides apart. In an embodiment, the target sequences are located about 4000 nucleotides apart. In an embodiment, the target sequences are located about 5000 nucleotides apart. In an embodiment, the target sequences are located about 6000 nucleotides apart.

[0462] In some aspects, the plurality of gRNA molecules each target sequences within the same gene or gene locus. In another aspect, the plurality of gRNA molecules each target sequences within 2 or more different genes or gene loci.

[0463] In some aspects, the invention provides compositions and cells comprising a plurality, for example, 2 or more, for example, 2, gRNA molecules of the invention, wherein the plurality of gRNA molecules target sequences less than 15,000, less than 14,000, less than 13,000, less than 2,000, less than 11,000, less than 10,000, less than 9,000, less than 8,000, less than 7,000, less than 6,000, less than 5,000, less than 4,000, less than 3,000, less than 2,000, less than 1,000, less than 900, less than 800, less than 700, less than 600, less than 500, less than 400, less than 300, less than 200, less than 100, less than 90, less than 80, less than 70, less than 60, less than 50, less than 40, or less than 30 nucleotides apart. In an embodiment, the target sequences are on the same strand of duplex nulceic acid. In an embodiment, the target sequences are on different strands of duplex nucleic acid.

[0464] In one embodiment, the invention provides a method for excising (e.g., deleting) nucleic acid disposed between two gRNA binding sites disposed less than 25,000, less than 20,000, less than 15,000, less than 14,000, less than 13,000, less than 12,000, less than 11,000, less than 10,000, less than 9,000, less than 8,000, less than 7,000, less than 6,000, less than 5,000, less than 4,000, less than 3,000, less than 2,000, less than 1,000, less than 900, less than 800, less than 700, less than 600, less than 500, less than 400, less than 300, less than 200, less than 100, less than 90, less than 80, less than 70, less than 60, less than 50, less than 40, or less than 30 nucleotides apart on the same or different strands of duplex nucleic acid. In an embodiment, the method provides for deletion of more than 50%, more than 60%, more than 70%, more than 80%, more than 85%, more than 86%, more than 87%, more than 88%, more than 89%, more than 90%, more than 91%, more than 92%, more than 93%, more than 94%, more than 95%, more than 96%, more than 97%, more than 98%, more than 99%, or 100% of the nucleotides disposed between the PAM sites associated with each gRNA binding site. In embodiments, the deletion further comprises of one or more nucleotides within one or more of the PAM sites associated with each gRNA binding site. In embodiments, the deletion also comprises one or more nucleotides outside of the region between the PAM sites associated with each gRNA binding site.

[0465] In one aspect, the two or more gRNA molecules comprise targeting domains targeting target sequences flanking a gene regulatory element, e.g., a promotor binding site, an enhancer region, or a repressor region, such that excision of the intervening sequence (or a portion of the intervening sequence) causes up- or down-regulation of a gene of interest. In other emboiments, the two or more gRNA molecules comprise targeting domains that target sequences flanking a gene, such that excision of the intervening sequence (or portion thereof) causes deletion of the gene of interest.

[0466] In an embodiment, the two or more gRNA molecules each include a targeting domain comprising, e.g., consisting of, a targeting domain sequence of Table 1, e.g., of Table 2 or, e.g., of Table 3. In embodiments, the two or more gRNA molecules each include a targeting domain comprising, e.g., consisting of, the targeting domain of a gRNA molecule which results in at least 15% upregulation in the number of F cells in a population of red blood cells differentiated (e.g., at day 7 following editing) from HSPCs edited by said gRNA ex vivo by the methods described herein. In aspects, the two or more gRNA molecules comprise targeting domains that are complementary with sequences in the same gene or region, e.g., the WIZ gene region. In aspects, the two or more gRNA molecules comprise targeting domains that are complementary with sequences of different genes or regions, for example one in the WIZ intron region and one in the WIZ exon region.

[0467] In one aspect, the two or more gRNA molecules comprise targeting domains targeting target sequences flanking a gene regulatory element, e.g., a promotor binding site, an enhancer region, or a repressor region, such that excision of the intervening sequence (or a portion of the intervening sequence) causes up- or down-regulation of a gene of interest. In another aspect, the two or more gRNA molecules comprise targeting domains targeting target sequences flanking a gene, such that excision of the intervening sequence (or a portion of the intervening sequence) causes deletion of the gene of interest. By way of example, the two or more gRNA molecules comprise targeting domains targeting target sequences flanking the WIZ gene, such that the WIZ gene is excised.

[0468] In an embodiment, the two or more gRNA molecules comprise targeting domains that comprise, e.g., consist of, targeting domains selected from Table 1.

[0469] In aspects, the two or more gRNA molecules comprise targeting domains comprising, e.g., consisting of, targeting domain sequences listed in Table 2. In aspects, the two or more gRNA molecules comprise targeting domains comprising, e.g., consisting of, targeting domain sequences of gRNAs listed in Table 3.

### VIII. Properties of the gRNA

[0470] It has further been surprisingly shown herein that single gRNA molecules may have target sequences in more than one loci (for example, loci with high sequence homology), and that, when such loci are present on the same chromosome, for example, within less than about 15,000 nucleotides, less than about 14,000 nucleotides, less than about 13,000 nucleotides, less than about 12,000 nucleotides, less than about 11,000 nucleotides, less than about 10,000 nucleotides, less than about 9,000 nucleotides, less than about 8,000 nucleotides, less than about 7,000 nucleotides, less than about 6,000 nucleotides, less than about 5,000 nucleotides, less than about 4,000 nucleotides, or less than about 3,000 nucleotides, (e.g., from about 4,000 to about 6,000 nucleotides apart) such a gRNA molecule may result in excision of the intervening sequence (or portion thereof), thereby resulting in a beneficial effect, for example, upregulation of fetal hemoglobin in erythroid cells differentiated from modified HSPCs (as described herein). Thus, in an aspect, the invention provides gRNA molecules which have target sequences at two loci, for example, to loci on the same chromosome, for example, which have target sequences at a WIZ intron region and at WIZ exon region (for example as described in Tables 1-3). Without begin bound by theory, it is belived that such gRNAs may result in the cutting of the genome at more than one location (e.g., at the target sequence in each of two regions), and that subsequent repair may result in a deletion of the intervening nucleic acid sequnce. Again, without being boudn by theory, deletion of said intervening sequence may have a desired effect on the expression or function of one or more proteins.

[0471] Without being bound by theory, it is believed that some indel patterns may be more advantageous than others. For example, indels which predominantly include insertions and/or deletions wich result in a “frameshift mutation” (e.g., 1- or 2- base pair insertion or deletions, or any insertion or deletion where n/3 is not a whole number (where n=the number of nucleotides in the insertion or deletion)) may be beneficial in reducing or eliminating expression of a functional protein. Likewise, indels which predominantly include “large deletions” (deletions of more than 10, 11, 12, 13, 14, 15, 20, 25, or 30 nucleotides, for example, more than 1 kb, more than 2 kb, more than 3 kb, more than 5 kb or more than 10 kb, for example, comprising sequence disposed between a first and second binding site for a gRNA, e.g., as described herein) may also be beneficial in, for example, removing critical regulatory sequences such as promoter binding sites, or altering the structure or function of a locus, which may similarly have an effect on expression of functional protein. While the indel patterns induced by a given gRNA/CRISPR system have surprisingly been found to be consistently reproduced for a given cell type, gRNA and CRISPR system, as described herein, not any single indel structure will inevtiably be produced in a given cell upon introduction of a gRNA/CRISPR system.

[0472] The invention thus provides for gRNA molecules which create a beneficial indel pattern or structure, for example, which have indel patterns or structures predominantly composed of large deletions. Such gRNA molecules may be selected by assessing the indel pattern or structure created by a candidate gRNA molecule in a test cell (for example, a HEK293 cell) or in the cell of interest, e.g., a HSPC cell by NGS, as described herein. As shown in the Examples, gRNA molecules have been discovered, which, when introduced into the desired cell population, result in a population of cells comprising a significant fraction of the cells having a large deletion at or near the target sequence of the gRNA. In some cases, the rate of large deletion indel formation is as high as 75%, 80%, 85%, 90% or more. The invention thus provides for populations of cells which comprise at least about 40% of cells (e.g., at least about 45%, at least about 50%, at least about 55%, at least about 60%, at least about 65%, at least about 70%, at least about 75%, at least about 80%, at least about 85%, at least about 90%, at least about 95%, or at least about 99%) having a large deletion, e.g., as described herein, at or near the target site of a gRNA moleucle described herein. The invention also provides for populations of cells which comprise at least about 50% of cells (e.g., at least about 55%, at least about 60%, at least about 65%, at least about 70%, at least about 75%, at least about 80%, at least about 85%, at least about 90%, at least about 95%, or at least about 99%) having a large deletion, e.g., as described herein, at or near the target site of a gRNA moleucle described herein.

[0473] The invention thus provides methods of selecting gRNA molecules for use in the therapeutic methods of the invention comprising: 1) providing a plurality of gRNA molecules to a target of interest, 2) assessing the indel pattern or structure created by use of said gRNA molecules, 3) selecting a gRNA molecule that forms an indel pattern or structure composed predominantly of frameshift mutations, large deletions or a combination thereof, and 4) using said selected gRNA in a methods of the invention.

[0474] The invention thus provides methods of selecting gRNA molecules for use in the therapeutic methods of the invention comprising: 1) providing a plurality of gRNA molecules to a target of interest, e.g., which have target sequences at more than one location 2) assessing the indel pattern or structure created by use of said gRNA molecules, 3) selecting a gRNA molecule that forms an excision of sequence comprising nucleic acid sequence located between the two target sequences, e.g., in at least about 25% or more of the cells of a population of cells which are exposed to said gRNA molecules, and 4) using said selected gRNA molecule in a methods of the invention.

[0475] The invention further provides methods of altering cells, and altered cells, wherein a particular indel pattern is constently produced with a given gRNA/CRISPR system in that cell type. The indel patterns, including the top 5 most frequently occuring indels observed with the gRNA/CRISPR systems described herein can be determined using the methods of the examples, and are disclosed, for example, in the Examples. As shown in the Examples, populations of cells are generated, wherein a signficant fraction of the cells comprises one of the top 5 indels (for example, populations of cells wherein one of the top 5 indels is present in more than 30%, more than 40%, more than 50%, more than 60% or more of the cells of the population. Thus, the invention provides cells, e.g., HSPCs (as described herein), which comprise an indel of any one of the top 5 indels observed with a given gRNA/CRISPR system. Further, the invention provides populations of cells, e.g., HSPCs (as described herein), which when assessed by, for example, NGS, comprise a high percentage of cells comprising one of the top 5 indels described herein for a given gRNA/CRISPR system. When used in connection with indel pattern analysis, a “high percentage” refers to at least about 50% (e.g., at least about 55%, at least about 60%, at least about 65%, at least about 70%, at least about 75%, at least about 80%, at least about 85%, at least about 90%, at least about 95%, or at least about 99%) of the cells of the population comprising one of the top 5 indels described herein for a given gRNA/CRISPR system. In other embodiments, the population of cells comprises at least about 25% (e.g., from about 25% to about 60%, e.g., from about 25% to about 50%, e.g., from about 25% to about 40%, e.g., from about 25% to about 35%) of cells which have one of the top 5 indels described herein for a given gRNA/CRISPR system.

[0476] It has also been discovered that certain gRNA molecules do not create indels at off-target sequences (e.g., off-target sequences outside of the WIZ gene region) within the genome of the target cell type, or produce indels at off target sites (e.g., off-target sequences outside of the WIZ region) at very low frequencies (e.g., <5% of cells within a population) relative to the frequency of indel creation at the target site. Thus, the invention provides for gRNA molecules and CRISPR systems which do not exhibit off-target indel formation in the target cell type, or which produce a frequency of off-target indel formation of less than 5%, for example, an indel at any off-target site outside of the WIZ gene region at a frequence of less than 5%. In embodiments, the invention provides gRNA molecules and CRISPR systems which do not exhibit any off target indel formation in the target cell type. Thus, the invention further provides a cell, e.g., a population of cells, e.g., HSPCs, e.g., as described herein, which comprise an indel at or near a target site of a gRNA molecule described herein (e.g., a frameshift indel, or any one of the top 5 indels produced by a given gRNA/CRISPR system, e.g., as described herein), but does not comprise an indel at any off-target site of the gRNA molecule, for example, an indel at any off-target site outside of the WIZ gene region. In other embodiments, the invention further provides a population of cells, e.g., HSPCs, e.g., as described herein, which comprises at least 20%, for example at least 30%, for example at least 40%, for example at least 50%, for example at least 60%, for example at least 70%, for example at least 75% of cells which have an indel at or near a target site of a gRNA molecule described herein (e.g., a frameshift indel, or any one of the top 5 indels produced by a given gRNA/CRISPR system, e.g., as described herein), but which comprises less than 5%, e.g., less than 4%, less than 3%, less than 2% or less than 1%, of cells comprising an indel at any off-target site of the gRNA molecule, for example, an indel at any off-target site outside of the WIZ gene region. In other embodiments, the invention further provides a population of cells, e.g., HSPCs, e.g., as described herein, which comprises at least 20%, for example at least 30%, for example at least 40%, for example at least 50%, for example at least 60%, for example at least 70%, for example at least 75%, for example at least 80%, for example at least 90%, for example at least 95%, of cells which have an indel within the WIZ gene region (e.g., at or near a sequence which is as least 90% homologous to the target sequence of the gRNA), but which comprises less than 5%, e.g., less than 4%, less than 3%, less than 2% or less than 1%, of cells comprising an indel at or near any off-target site outside of the WIZ generegion. In embodimetns, the off-target indel is is formed within a sequence of a gene, e.g., within a coding sequence of a gene. In embodiments no off-target indel is formed within a sequence of a gene, e.g., within a coding sequence of a gene, in the cell of interest, e.g., as described herein.

### IX. Delivery/Constructs

[0477] The components, e.g., a Cas9 molecule or gRNA molecule, or both, can be delivered, formulated, or administered in a variety of forms. As a non-limiting example, the gRNA molecule and Cas9 molecule can be formulated (in one or more compositions), directly delivered or administered to a cell in which a genome editing event is desired. Alternatively, nucleic acid encoding one or more components, e.g., a Cas9 molecule or gRNA molecule, or both, can be formulated (in one or more compositions), delivered or administered. In one aspect, the gRNA molecule is provided as DNA encoding the gRNA molecule and the Cas9 molecule is provided as DNA encoding the Cas9 molecule. In one embodiment, the gRNA molecule and Cas9 molecule are encoded on separate nucleic acid molecules. In one embodiment, the gRNA molecule and Cas9 molecule are encoded on the same nucleic acid molecule. In one aspect, the gRNA molecule is provided as RNA and the Cas9 molecule is provided as DNA encoding the Cas9 molecule. In one embodiment, the gRNA molecule is provided with one or more modifications, e.g., as described herein. In one aspect, the gRNA molecule is provided as RNA and the Cas9 molecule is provided as mRNA encoding the Cas9 molecule. In one aspect, the gRNA molecule is provided as RNA and the Cas9 molecule is provided as a protein. In one embodiment, the gRNA and Cas9 molecule are provided as a ribonuclear protein complex (RNP). In one aspect, the gRNA molecule is provided as DNA encoding the gRNA molecule and the Cas9 molecule is provided as a protein.

[0478] Delivery, e.g., delivery of the RNP, (e.g., to HSPC cells as described herein) may be accomplished by, for example, electroporation (e.g., as known in the art) or other method that renders the cell membrane permeable to nucleic acid and/or polypeptide molecules. In embodiments, the CRISPR system, e.g., the RNP as described herein, is delivered by electroporation using a 4D-Nucleofector (Lonza), for example, using program CM-137 on the 4D-Nucleofector (Lonza). In embodiments, the CRISPR system, e.g., the RNP as described herein, is delivered by electroporation using a voltage from about 800 volts to about 2000 volts, e.g., from about 1000 volts to about 1800 volts, e.g., from about 1200 volts to about 1800 volts, e.g., from about 1400 volts to about 1800 volts, e.g., from about 1600 volts to about 1800 volts, e.g., about 1700 volts, e.g., at a voltage of 1700 volts. In embodiments, the pulse width/lenth is from about 10 ms to about 50 ms, e.g., from about 10 ms to about 40 ms, e.g., from about 10 ms to about 30 ms, e.g., from about 15 ms to about 25 ms, e.g., about 20 ms, e.g., 20 ms. In embodiments, 1, 2, 3, 4, 5, or more, e.g., 2, e.g., 1 pulses are used. In an embodiment, the CRISPR system, e.g., the RNP as described herein, is delivered by electroporation using a voltage of about 1700 volts (e.g., 1700 volts), a pulse width of about 20 ms (e.g., 20 ms), using a single (1) pulse. In embodiments, electroporation is accomplished using a Neon electroporator. Additional techniques for rendering the membrane permeable are known in the art and include, for example, cell squeezing (e.g., as described in WO2015/023982 and WO2013/059343, the contents of which are hereby incorporated by reference in their entirety), nanoneedles (e.g., as described in Chiappini et al., Nat. Mat., 14; 532-39, or US2014/0295558, the contents of which are hereby incorporated by reference in their entirety) and nanostraws (e.g., as described in Xie, ACS Nano, 7(5); 4351-58, the contents of which are hereby incorporated by reference in their entirety).

[0479] When a component is delivered encoded in DNA the DNA will typically include a control region, e.g., comprising a promoter, to effect expression. Useful promoters for Cas9 molecule sequences include CMV, EF- lalpha, MSCV, PGK, CAG control promoters. Useful promoters for gRNAs include H1, EF-1a and U6 promoters. Promoters with similar or dissimilar strengths can be selected to tune the expression of components. Sequences encoding a Cas9 molecule can comprise a nuclear localization signal (NLS), e.g., an SV40 NLS. In an embodiment, a promoter for a Cas9 molecule or a gRNA molecule can be, independently, inducible, tissue specific, or cell specific.

[0480] DNA-based Delivery of a Cas9 molecule and or a gRNA molecule

[0481] DNA encoding Cas9 molecules and/or gRNA molecules, can be administered to subjects or delivered into cells by art-known methods or as described herein. For example, Cas9-encoding and/or gRNA-encoding DNA can be delivered, e.g., by vectors (e.g., viral or non-viral vectors), non-vector based methods (e.g., using naked DNA or DNA complexes), or a combination thereof.

[0482] In some embodiments, the Cas9- and/or gRNA-encoding DNA is delivered by a vector (e.g., viral vector/virus, plasmid, minicircle or nanoplasmid).

[0483] A vector can comprise a sequence that encodes a Cas9 molecule and/or a gRNA molecule. A vector can also comprise a sequence encoding a signal peptide (e.g., for nuclear localization, nucleolar localization, mitochondrial localization), fused, e.g., to a Cas9 molecule sequence. For example, a vector can comprise one or more nuclear localization sequence (e.g., from SV40) fused to the sequence encoding the Cas9 molecule.

[0484] One or more regulatory/control elements, e.g., a promoter, an enhancer, an intron, a polyadenylation signal, a Kozak consensus sequence, internal ribosome entry sites (IRES), a 2A sequence, and a splice acceptor or donor can be included in the vectors. In some embodiments, the promoter is recognized by RNA polymerase II (e.g., a CMV promoter). In other embodiments, the promoter is recognized by RNA polymerase III (e.g., a U6 promoter). In some embodiments, the promoter is a regulated promoter (e.g., inducible promoter). In other embodiments, the promoter is a constitutive promoter. In some embodiments, the promoter is a tissue specific promoter. In some embodiments, the promoter is a viral promoter. In other embodiments, the promoter is a non-viral promoter.

[0485] In some embodiments, the vector or delivery vehicle is a minicircle. In some embodiments, the vector or delivery vehicle is a nanoplasmid.

[0486] In some embodiments, the vector or delivery vehicle is a viral vector (e.g., for generation of recombinant viruses). In some embodiments, the virus is a DNA virus (e.g., dsDNA or ssDNA virus). In other embodiments, the virus is an RNA virus (e.g., an ssRNA virus).

[0487] Exemplary viral vectors/viruses include, e.g., retroviruses, lentiviruses, adenovirus, adeno- associated virus (AAV), vaccinia viruses, poxviruses, and herpes simplex viruses. Viral vector technology is well known in the art and is described, for example, in Sambrook et al., 2012, MOLECULAR CLONING: A LABORATORY MANUAL, volumes 1 -4, Cold Spring Harbor Press, NY), and in other virology and molecular biology manuals.

[0488] In some embodiments, the virus infects dividing cells. In other embodiments, the virus infects non-dividing cells. In some embodiments, the virus infects both dividing and non-dividing cells. In some embodiments, the virus can integrate into the host genome. In some embodiments, the virus is engineered to have reduced immunity, e.g., in human. In some embodiments, the virus is replication-competent. In other embodiments, the virus is replication- defective, e.g., having one or more coding regions for the genes necessary for additional rounds of virion replication and/or packaging replaced with other genes or deleted. In some embodiments, the virus causes transient expression of the Cas9 molecule and/or the gRNA molecule. In other embodiments, the viurs causes long-lasting, e.g., at least 1 week, 2 weeks, 1 month, 2 months, 3 months, 6 months, 9 months, 1 year, 2 years, or permanent expression, of the Cas9 molecule and/or the gRNA molecule. The packaging capacity of the viruses may vary, e.g., from at least about 4 kb to at least about 30 kb, e.g., at least about 5 kb, 10 kb, 15 kb, 20 kb, 25 kb, 30 kb, 35 kb, 40 kb, 45 kb, or 50 kb.

[0489] In some embodiments, the Cas9- and/or gRNA-encoding DNA is delivered by a recombinant retrovirus. In some embodiments, the retrovirus (e.g., Moloney murine leukemia vims) comprises a reverse transcriptase, e.g., that allows integration into the host genome. In some embodiments, the retrovirus is replication-competent. In other embodiments, the retrovirus is replication-defective, e.g., having one of more coding regions for the genes necessary for additional rounds of virion replication and packaging replaced with other genes, or deleted.

[0490] In some embodiments, the Cas9- and/or gRNA-encoding DNA is delivered by a recombinant lentivirus. For example, the lentivirus is replication-defective, e.g., does not comprise one or more genes required for viral replication.

[0491] In some embodiments, the Cas9- and/or gRNA-encoding DNA is delivered by a recombinant adenovirus. In some embodiments, the adenovirus is engineered to have reduced immunity in human.

[0492] In some embodiments, the Cas9- and/or gRNA-encoding DNA is delivered by a recombinant AAV. In some embodiments, the AAV can incorporate its genome into that of a host cell, e.g., a target cell as described herein. In some embodiments, the AAV is a self- complementary adeno-associated virus (scAAV), e.g., a scAAV that packages both strands which anneal together to form double stranded DNA. AAV serotypes that may be used in the disclosed methods include, e.g., AAV 1, AAV2, modified AAV2 (e.g., modifications at Y444F, Y500F, Y730F and/or S662V), AAV3, modified AAV3 (e.g., modifications at Y705F, Y73 1 F and/or. T492V), AAV4, AAV5, AAV6, modified AAV6 (e.g., modifications at S663V and/or T492V), AAV8. AAV 8.2, AAV9, AAV rh 10, and pseudotyped AAV, such as AAV2/8, AAV2/5 and AAV2/6 can also be used in the disclosed methods.

[0493] In some embodiments, the Cas9- and/or gRNA-encoding DNA is delivered by a hybrid virus, e.g., a hybrid of one or more of the viruses described herein.

[0494] A Packaging cell is used to form a virus particle that is capable of infecting a host or target cell. Such a cell includes a 293 cell, which can package adenovirus, and a ψ2 cell or a PA317 cell, which can package retrovirus. A viral vector used in gene therapy is usually generated by a producer cell line that packages a nucleic acid vector into a viral particle. The vector typically contains the minimal viral sequences required for packaging and subsequent integration into a host or target cell (if applicable), with other viral sequences being replaced by an expression cassette encoding the protein to be expressed. For example, an AAV vector used in gene therapy typically only possesses inverted terminal repeat (ITR) sequences from the AAV genome which are required for packaging and gene expression in the host or target cell. The missing viral functions are supplied in trans by the packaging cell line. Henceforth, the viral DNA is packaged in a cell line, which contains a helper plasmid encoding the other AAV genes, namely rep and cap, but lacking ITR sequences. The cell line is also infected with adenovirus as a helper. The helper virus promotes replication of the AAV vector and expression of AAV genes from the helper plasmid. The helper plasmid is not packaged in significant amounts due to a lack of ITR sequences. Contamination with adenovirus can be reduced by, e.g., heat treatment to which adenovirus is more sensitive than AAV.

[0495] In an embodiment, the viral vector has the ability of cell type and/or tissue type recognition. For example, the viral vector can be pseudotyped with a different/alternative viral envelope glycoprotein; engineered with a cell type-specific receptor (e.g., genetic modification of the viral envelope glycoproteins to incorporate targeting ligands such as a peptide ligand, a single chain antibodie, a growth factor); and/or engineered to have a molecular bridge with dual specificities with one end recognizing a viral glycoprotein and the other end recognizing a moiety of the target cell surface (e.g., ligand-receptor, monoclonal antibody, avidin-biotin and chemical conjugation).

[0496] In an embodiment, the viral vector achieves cell type specific expression. For example, a tissue-specific promoter can be constructed to restrict expression of the transgene (Cas 9 and gRNA) in only the target cell. The specificity of the vector can also be mediated by microRNA- dependent control of transgene expression. In an embodiment, the viral vector has increased efficiency of fusion of the viral vector and a target cell membrane. For example, a fusion protein such as fusion-competent hemagglutin (HA) can be incorporated to increase viral uptake into cells. In an embodiment, the viral vector has the ability of nuclear localization. For example, aviruse that requires the breakdown of the cell wall (during cell division) and therefore will not infect a non-diving cell can be altered to incorporate a nuclear localization peptide in the matrix protein of the virus thereby enabling the transduction of non-proliferating cells.

[0497] In some embodiments, the Cas9- and/or gRNA-encoding DNA is delivered by a non- vector based method (e.g., using naked DNA or DNA complexes). For example, the DNA can be delivered, e.g., by organically modified silica or silicate (Ormosil), electroporation, gene gun, sonoporation, magnetofection, lipid-mediated transfection, dendrimers, inorganic nanoparticles, calcium phosphates, or a combination thereof.

[0498] In some embodiments, the Cas9- and/or gRNA-encoding DNA is delivered by a combination of a vector and a non-vector based method. For example, a virosome comprises a liposome combined with an inactivated virus (e.g., HIV or influenza virus), which can result in more efficient gene transfer, e.g., in a respiratory epithelial cell than either a viral or a liposomal method alone.

[0499] In an embodiment, the delivery vehicle is a non-viral vector. In an embodiment, the non- viral vector is an inorganic nanoparticle (e.g., attached to the payload to the surface of the nanoparticle). Exemplary inorganic nanoparticles include, e.g., magnetic nanoparticles (e.g., Fe lvln0₂), or silica. The outer surface of the nanoparticle can be conjugated with a positively charged polymer (e.g., polyethylenimine, polylysine, polyserine) which allows for attachment (e.g., conjugation or entrapment) of payload. In an embodiment, the non-viral vector is an organic nanoparticle (e.g., entrapment of the payload inside the nanoparticle). Exemplary organic nanoparticles include, e.g., SNALP liposomes that contain cationic lipids together with neutral helper lipids which are coated with polyethylene glycol (PEG) and protamine and nucleic acid complex coated with lipid coating.

[0500] Exemplary lipids and/or polymers for for transfer of CRISPR systems or nucleic acid, e.g., vectors, encoding CRISPR systems or components thereof include, for example, those described in WO2011/076807, WO2014/136086, WO2005/060697, WO2014/140211, WO2012/031046, WO2013/103467, WO2013/006825, WO2012/006378, WO2015/095340, and WO2015/095346, the contents of each of the foregoing are hereby incorported by reference in their entirety. In an embodiment, the vehicle has targeting modifications to increase target cell update of nanoparticles and liposomes, e.g., cell specific antigens, monoclonal antibodies, single chain antibodies, aptamers, polymers, sugars, and cell penetrating peptides. In an embodiment, the vehicle uses fusogenic and endosome-destabilizing peptides/polymers. In an embodiment, the vehicle undergoes acid-triggered conformational changes (e.g., to accelerate endosomal escape of the cargo). In an embodiment, a stimuli-cleavable polymer is used, e.g., for release in a cellular compartment. For example, disulfide-based cationic polymers that are cleaved in the reducing cellular environment can be used.

[0501] In an embodiment, the delivery vehicle is a biological non-viral delivery vehicle. In an embodiment, the vehicle is an attenuated bacterium (e.g., naturally or artificially engineered to be invasive but attenuated to prevent pathogenesis and expressing the transgene (e.g., Listeria monocytogenes, certain Salmonella strains, Bifidobacterium longum, and modified Escherichia coli), bacteria having nutritional and tissue-specific tropism to target specific tissues, bacteria having modified surface proteins to alter target tissue specificity). In an embodiment, the vehicle is a genetically modified bacteriophage (e.g., engineered phages having large packaging capacity, less immunogenic, containing mammalian plasmid maintenance sequences and having incorporated targeting ligands). In an embodiment, the vehicle is a mammalian virus-like particle. For example, modified viral particles can be generated (e.g., by purification of the “empty” particles followed by ex vivo assembly of the virus with the desired cargo). The vehicle can also be engineered to incorporate targeting ligands to alter target tissue specificity. In an embodiment, the vehicle is a biological liposome. For example, the biological liposome is a phospholipid-based particle derived from human cells (e.g., erythrocyte ghosts, which are red blood cells broken down into spherical structures derived from the subject (e.g., tissue targeting can be achieved by attachment of various tissue or cell-specific ligands), or secretory exosomes - subject (i.e., patient) derived membrane-bound nanovescicle (30 -100 nm) of endocytic origin (e.g., can be produced from various cell types and can therefore be taken up by cells without the need of for targeting ligands).

[0502] In an embodiment, one or more nucleic acid molecules (e.g., DNA molecules) other than the components of a Cas system, e.g., the Cas9 molecule component and/or the gRNA molecule component described herein, are delivered. In an embodiment, the nucleic acid molecule is delivered at the same time as one or more of the components of the Cas system are delivered. In an embodiment, the nucleic acid molecule is delivered before or after (e.g., less than about 30 minutes, 1 hour, 2 hours, 3 hours, 6 hours, 9 hours, 12 hours, 1 day, 2 days, 3 days, 1 week, 2 weeks, or 4 weeks) one or more of the components of the Cas9 system are delivered. In an embodiment, the nucleic acid molecule is delivered by a different means than one or more of the components of the Cas9 system, e.g., the Cas9 molecule component and/or the gRNA molecule component, are delivered. The nucleic acid molecule can be delivered by any of the delivery methods described herein. For example, the nucleic acid molecule can be delivered by a viral vector, e.g., an integration-deficient lentivirus, and the Cas9 molecule component and/or the gRNA molecule component can be delivered by electroporation, e.g., such that the toxicity caused by nucleic acids (e.g., DNAs) can be reduced. In an embodiment, the nucleic acid molecule encodes a therapeutic protein, e.g., a protein described herein. In an embodiment, the nucleic acid molecule encodes an RNA molecule, e.g., an RNA molecule described herein.

### Delivery of RNA Encoding a Cas9 Molecule

[0503] RNA encoding Cas9 molecules (e.g., active Cas9 molecules, inactive Cas9 molecules or inactive Cas9 fusion proteins) and/or gRNA molecules, can be delivered into cells, e.g., target cells described herein, by art-known methods or as described herein. For example, Cas9-encoding and/or gRNA-encoding RNA can be delivered, e.g., by microinjection, electroporation, lipid-mediated transfection, peptide-mediated delivery, or a combination thereof.

### Delivery of Cas9 Molecule as Protein

[0504] Cas9 molecules (e.g., active Cas9 molecules, inactive Cas9 molecules or inactive Cas9 fusion proteins) can be delivered into cells by art-known methods or as described herein. For example, Cas9 protein molecules can be delivered, e.g., by microinjection, electroporation, lipid-mediated transfection, peptide-mediated delivery, cell squeezing or abrasion (e.g., by nanoneedles) or a combination thereof. Delivery can be accompanied by DNA encoding a gRNA or by a gRNA, e.g., by precomplexing the gRNA and the Cas9 protein in a ribonuclear protein complex (RNP).

[0505] In an aspect the Cas9 molecule, e.g., as described herein, is delivered as a protein and the gRNA molecule is delivered as one or more RNAs (e.g., as a dgRNA or sgRNA, as described herein). In embodiments, the Cas9 protein is complexed with the gRNA molecule prior to delivery to a cell, e.g., as described herein, as a ribonuclear protein complex (“RNP”). In embodiments, the RNP can be delivered into cells, e.g., described herein, by any art-known method, e.g., electroporation. As described herein, and without being bound by theory, it can be preferrable to use a gRNA moleucle and Cas9 molecule which result in high % editing at the target sequence (e.g., >85%, >90%, >95%, >98%, or >99%) in the target cell, e.g., described herein, even when the concentration of RNP delivered to the cell is reduced. Again, without being bound by theory, delivering a reduced or low concentration of RNP comprising a gRNA moleucle that produces a high % editing at the target sequence in the target cell (including at the low RNP concentration), can be beneficial because it may reduce the frequency and number of off-target editing events. In one aspect, where a low or reduced concentration of RNP is to be used, the following exemplary procedure can be used to generate the RNP with a dgRNA molecule:
[0506] 1. Provide the Cas9 molecule and the tracr in solution at a high concentration (e.g., a concentration higher than the final RNP concentration to be delivered to the cell), and allow the two components to equilibrate;
[0507] 2. Provide the crRNA molecule, and allow the components to equilibrate (thereby forming a high-concentration solution of the RNP);
[0508] 3. Dilute the RNP solution to the desired concentration;
[0509] 4. Deliver said RNP at said desired concentration to the target cells, e.g., by electroporation.

[0510] The above procedure may be modified for use with sgRNA molecules by omitting step 2, above, and in step 1, providing the Cas9 molecule and the sgRNA molecule in solution at high concentration, and allowing the components to equilibrate. In embodiments, the Cas9 moleucle and each gRNA component are provided in solution at a 1:2 ratio (Cas9:gRNA), e.g., a 1:2 molar ratio of Cas9:gRNA molecule. Where dgRNA molecules are used, the ratio, e.g., molar rato, is 1:2:2 (Cas9:tracr:crRNA). In embodiments, the RNP is formed at a concentration of 20 uM or higher, e.g., a concentration from about 20 uM to about 50 uM. In embodiments, the RNP is formed at a concentration of 10 uM or higher, e.g., a concentration from about 10 uM to about 30 uM. In embodiments, the RNP is diluted to a final concentration of 10 uM or less (e.g., a concentration from about 0.01 uM to about 10 uM) in a solution comprising the target cell (e.g., described herein) for delivery to said target cell. In embodiments, the RNP is diluted to a final concentration of 3 uM or less (e.g., a concentration from about 0.01 uM to about 3 uM) in a solution comprising the target cell (e.g., described herein) for delivery to said target cell. In embodiments, the RNP is diluted to a final concentration of luM or less (e.g., a concentration from about 0.01 uM to about luM) in a solution comprising the target cell (e.g., described herein) for delivery to said target cell. In embodiments, the RNP is diluted to a final concentration of 0.3 uM or less (e.g., a concentration from about 0.01 uM to about 0.3 uM) in a solution comprising the target cell (e.g., described herein) for delivery to said target cell. In embodiments, the RNP is provided at a final concentration of about 3 uM in a solution comprising the target cell (e.g., described herein) for delivery to said target cell. In embodiments, the RNP is provided at a final concentration of about 2 uM in a solution comprising the target cell (e.g., described herein) for delivery to said target cell. In embodiments, the RNP is provided at a final concentration of about luM in a solution comprising the target cell (e.g., described herein) for delivery to said target cell. In embodiments, the RNP is provided at a final concentration of about 0.3 uM in a solution comprising the target cell (e.g., described herein) for delivery to said target cell. In embodiments, the RNP is provided at a final concentration of about 0.1 uM in a solution comprising the target cell (e.g., described herein) for delivery to said target cell. In embodiments, the RNP is provided at a final concentration of about 0.05 uM in a solution comprising the target cell (e.g., described herein) for delivery to said target cell. In embodiments, the RNP is provided at a final concentration of about 0.03 uM in a solution comprising the target cell (e.g., described herein) for delivery to said target cell. In embodiments, the RNP is provided at a final concentration of about 0.01 uM in a solution comprising the target cell (e.g., described herein) for delivery to said target cell. In embodiments, the RNP is formulated in a medium suitable for electroporation. In embodiments, the RNP is delivered to cells, e.g., HSPC cells, e.g., as described herein, by electroporation, e.g., using electroporation conditions described herein.

[0511] In aspects, the components of the gene editing system (e.g., CRISPR system) and/or nucleic acid encoding one or more components of the gene editing system (e.g., CRISPR system) are introduced into the cells by mechanically perturbing the cells, for example, by passing said cells through a pore or channel which constricts the cells. Such purturbation may be accomplished in a solution comprising the components of the gene editing system (e.g., CRISPR system) and/or nucleic acid encoding one or more components of the gene editing system (e.g., CRISPR system), e.g., as described herein. In embodiments, the purturbation is accomplished using a TRIAMF system, e.g., as described herein, for example, in the Examples and in PCT Patent Application PCT/US17/54110 (incorporated herein by reference in its entirety).

### Bi-Modal or Differential Delivery of Components

[0512] Separate delivery of the components of a Cas system, e.g., the Cas9 molecule component and the gRNA molecule component, and more particularly, delivery of the components by differing modes, can enhance performance, e.g., by improving tissue specificity and safety.

[0513] In an embodiment, the Cas9 molecule and the gRNA molecule are delivered by different modes, or as sometimes referred to herein as differential modes. Different or differential modes, as used herein, refer modes of delivery that confer different pharmacodynamic or pharmacokinetic properties on the subject component molecule, e.g., a Cas9 molecule, gRNA molecule, or template nucleic acid. For example, the modes of delivery can result in different tissue distribution, different half-life, or different temporal distribution, e.g., in a selected compartment, tissue, or organ.

[0514] Some modes of delivery, e.g., delivery by a nucleic acid vector that persists in a cell, or in progeny of a cell, e.g., by autonomous replication or insertion into cellular nucleic acid, result- in more persistent expression of and presence of a component.

### X. Methods of Treatment

[0515] Without being bound by theory, the invention here is based in part on the surprising finding of the linkage between WIZ gene expression/protein activity and the hemoglobin F (HbF) production. As demonstrated in the examples and figures, knocking down or knocking out WIZ gene or WIZ protein in cells (by various modalities/compostions described herein) significantly increased HbF induction in those cells, thereby treating HbF-associated conditions and disorders (e.g., hemoglobinopathies, e.g., sickle cell disease and beta thalassemia).

[0516] The Cas9 systems, e.g., one or more gRNA molecules and one or more Cas9 molecules, described herein are useful for the treatment of disease in a mammal, e.g., in a human. The terms “treat,” “treated,” “treating,” and “treatment,” include the administration of cas9 systems, e.g., one or more gRNA molecules and one or more cas9 molecules, to cells to prevent or delay the onset of the symptoms, complications, or biochemical indicia of a disease, alleviating the symptoms or arresting or inhibiting further development of the disease, condition, or disorder. Treatment may also include the administration of one or more (e.g., a population of) cells, e.g., HSPCs, that have been modified by the introduction of a gRNA molecule (or more than one gRNA molecule) of the present invention, or by the introduction of a CRISPR system as described herein, or by any of the methods of preparing said cells described herein, to prevent or delay the onset of the symptoms, complications, or biochemical indicia of a disease, alleviating the symptoms or arresting or inhibiting further development of the disease, condition, or disorder. Treatment may be prophylactic (to prevent or delay the onset of the disease, or to prevent the manifestation of clinical or subclinical symptoms thereof) or therapeutic suppression or alleviation of symptoms after the manifestation of the disease. Treatment can be measured by the therapeutic measures described hererin. Thus, the methods of “treatment” of the present invention also include administration of cells altered by the introduction of a cas9 system (e.g., one or more gRNA molecules and one or more Cas9 molecules) into said cells to a subject in order to cure, reduce the severity of, or ameliorate one or more symptoms of a disease or condition, in order to prolong the health or survival of a subject beyond that expected in the absence of such treatment. For example, “treatment” includes the alleviation of a disease symptom in a subject by at least 5%, 6%, 7%, 8%, 9%, 10%, 11%, 12%, 13%, 14%, 15%, 16%, 17%, 18%, 19%, 20%, 25%, 30%, 35%, 40%, 45%, 50%, 55%, 60%, 65%, 70%, 75%, 80%, 85%, 90%, 95% or more.

[0517] Cas9 systems comprising gRNA molecules comprising the targeting domains described herein, e.g., in Table 1, and the methods and cells (e.g., as described herein) are useful for the treatment of hemoglobinopathies.

### Delivery Timing

[0518] In an embodiment, one or more nucleic acid molecules (e.g., DNA molecules) other than the components of a Cas system, e.g., the Cas9 molecule component and/or the gRNA molecule component described herein, are delivered. In an embodiment, the nucleic acid molecule is delivered at the same time as one or more of the components of the Cas system are delivered. In an embodiment, the nucleic acid molecule is delivered before or after (e.g., less than about 30 minutes, 1 hour, 2 hours, 3 hours, 6 hours, 9 hours, 12 hours, 1 day, 2 days, 3 days, 1 week, 2 weeks, or 4 weeks) one or more of the components of the Cas system are delivered. In an embodiment, the nucleic acid molecule is delivered by a different means than one or more of the components of the Cas system, e.g., the Cas9 molecule component and/or the gRNA molecule component, are delivered. The nucleic acid molecule can be delivered by any of the delivery methods described herein. For example, the nucleic acid molecule can be delivered by a viral vector, e.g., an integration-deficient lentivirus, and the Cas9 molecule component and/or the gRNA molecule component can be delivered by electroporation, e.g., such that the toxicity caused by nucleic acids (e.g., DNAs) can be reduced. In an embodiment, the nucleic acid molecule encodes a therapeutic protein, e.g., a protein described herein. In an embodiment, the nucleic acid molecule encodes an RNA molecule, e.g, an RNA molecule described herein.

### Bi-Modal or Differential Delivery of Components

[0519] Separate delivery of the components of a Cas system, e.g., the Cas9 molecule component and the gRNA molecule component, and more particularly, delivery of the components by differing modes, can enhance performance, e.g., by improving tissue specificity and safety. In an embodiment, the Cas9 molecule and the gRNA molecule are delivered by different modes, or as sometimes referred to herein as differential modes. Different or differential modes, as used herein, refer modes of delivery, that confer different pharmacodynamic or pharmacokinetic properties on the subject component molecule, e.g., a Cas9 molecule, gRNA molecule, template nucleic acid, or payload. E.g., the modes of delivery can result in different tissue distribution, different half-life, or different temporal distribution, e.g., in a selected compartment, tissue, or organ.

[0520] Some modes of delivery, e.g., delivery by a nucleic acid vector that persists in a cell, or in progeny of a cell, e.g., by autonomous replication or insertion into cellular nucleic acid, result in more persistent expression of and presence of a component. Examples include viral, e.g., adeno associated virus or lentivirus, delivery.

[0521] By way of example, the components, e.g., a Cas9 molecule and a gRNA molecule, can be delivered by modes that differ in terms of resulting half life or persistent of the delivered component the body, or in a particular compartment, tissue or organ. In an embodiment, a gRNA molecule can be delivered by such modes. The Cas9 molecule component can be delivered by a mode which results in less persistence or less exposure of its to the body or a particular compartment or tissue or organ.

[0522] More generally, in an embodiment, a first mode of delivery is used to deliver a first component and a second mode of delivery is used to deliver a second component. The first mode of delivery confers a first pharmacodynamic or pharmacokinetic property. The first pharmacodynamic property can be, e.g., distribution, persistence, or exposure, of the component, or of a nucleic acid that encodes the component, in the body, a compartment, tissue or organ. The second mode of delivery confers a second pharmacodynamic or pharmacokinetic property. The second pharmacodynamic property can be, e.g., distribution, persistence, or exposure, of the component, or of a nucleic acid that encodes the component, in the body, a compartment, tissue or organ.

[0523] In an embodiment, the first pharmacodynamic or pharmacokinetic property, e.g., distribution, persistence or exposure, is more limited than the second pharmacodynamic or pharmacokinetic property.

[0524] In an embodiment, the first mode of delivery is selected to optimize, e.g., minimize, a pharmacodynamic or pharmacokinetic property, e.g., distribution, persistence or exposure.

[0525] In an embodiment, the second mode of delivery is selected to optimize, e.g., maximize, a pharmacodynamic or pharmcokinetic property, e.g., distribution, persistence or exposure.

[0526] In an embodiment, the first mode of delivery comprises the use of a relatively persistent element, e.g., a nucleic acid, e.g., a plasmid or viral vector, e.g., an AAV or lentivirus. As such vectors are relatively persistent product transcribed from them would be relatively persistent.

[0527] In an embodiment, the second mode of delivery comprises a relatively transient element, e.g., an RNA or protein.

[0528] In an embodiment, the first component comprises gRNA, and the delivery mode is relatively persistent, e.g., the gRNA is transcribed from a plasmid or viral vector, e.g., an AAV or lentivirus. Transcription of these genes would be of little physiological consequence because the genes do not encode for a protein product, and the gRNAs are incapable of acting in isolation. The second component, a Cas9 molecule, is delivered in a transient manner, for example as mRNA or as protein, ensuring that the full Cas9 molecule/gRNA molecule complex is only present and active for a short period of time.

[0529] Furthermore, the components can be delivered in different molecular form or with different delivery vectors that complement one another to enhance safety and tissue specificity.

[0530] Use of differential delivery modes can enhance performance, safety and efficacy. For example, the likelihood of an eventual off-target modification can be reduced. Delivery of immunogenic components, e.g., Cas9 molecules, by less persistent modes can reduce immunogenicity, as peptides from the bacterially-derived Cas enzyme are displayed on the surface of the cell by MHC molecules. A two-part delivery system can alleviate these drawbacks.

[0531] Differential delivery modes can be used to deliver components to different, but overlapping target regions. The formation of active complex is minimized outside the overlap of the target regions. Thus, in an embodiment, a first component, e.g., a gRNA molecule is delivered by a first delivery mode that results in a first spatial, e.g., tissue, distribution. A second component, e.g., a Cas9 molecule is delivered by a second delivery mode that results in a second spatial, e.g., tissue, distribution. In an embodiment, the first mode comprises a first element selected from a liposome, nanoparticle, e.g., polymeric nanoparticle, and a nucleic acid, e.g., viral vector. The second mode comprises a second element selected from the group. In an embodiment, the first mode of delivery comprises a first targeting element, e.g., a cell specific receptor or an antibody, and the second mode of delivery does not include that element. In an embodiment, the second mode of delivery comprises a second targeting element, e.g., a second cell specific receptor or second antibody.

[0532] When the Cas9 molecule is delivered in a virus delivery vector, a liposome, or polymeric nanoparticle, there is the potential for delivery to and therapeutic activity in multiple tissues, when it may be desirable to only target a single tissue. A two-part delivery system can resolve this challenge and enhance tissue specificity. If the gRNA molecule and the Cas9 molecule are packaged in separated delivery vehicles with distinct but overlapping tissue tropism, the fully functional complex is only be formed in the tissue that is targeted by both vectors.

[0533] Candidate Cas molecules, e.g., Cas9 molecules, candidate gRNA molecules, candidate Cas9 molecule/gRNA molecule complexes, and candidate CRISPR systems, can be evaluated by art-known methods or as described herein. For example, exemplary methods for evaluating the endonuclease activity of Cas9 molecule are described, e.g., in Jinek el al., SCIENCE 2012; 337(6096):8 16-821.

### Hemoglobinopathies

[0534] Hemoglobinopathies encompass a number of anemias of genetic origin in which there is a decreased production and/or increased destruction (hemolysis) of red blood cells (RBCs). These also include genetic defects that result in the production of abnormal hemoglobins with a concomitant impaired ability to maintain oxygen concentration. Some such disorders involve the failure to produce normal β -globin in sufficient amounts, while others involve the failure to produce normal β -globin entirely. These disorders associated with the β -globin protein are referred to generally as β- hemoglobinopathies. For example, β -thalassemias result from a partial or complete defect in the expression of the β -globin gene, leading to deficient or absent HbA. Sickle cell anemia results from a point mutation in the β -globin structural gene, leading to the production of an abnormal (sickle) hemoglobin (HbS). HbS is prone to polymerization, particularly under deoxygenated conditions. HbS RBCs are more fragile than normal RBCs and undergo hemolysis more readily, leading eventually to anemia.

[0535] In an embodiment, a hemoglobinopathies-associated gene is targeted, using the Cas9 molecule and gRNA molecule described herein. Exemplary targets include, e.g., genes associated with control of the gamma-globin genes. In an embodiment, the target is a nondeletional HPFH region.

[0536] Fetal hemoglobin (also hemoglobin F or HbF or α2γ2) is a tetramer of two adult alpha- globin polypeptides and two fetal beta-like gamma-globin polypeptides. HbF is the main oxygen transport protein in the human fetus during the last seven months of development in the uterus and in the newborn until roughly 6 months old. Functionally, fetal hemoglobin differs most from adult hemoglobin in that it is able to bind oxygen with greater affinity than the adult form, giving the developing fetus better access to oxygen from the mother’s bloodstream.

[0537] In newborns, fetal hemoglobin is nearly completely replaced by adult hemoglobin by approximately 6 months postnatally. In adults, fetal hemoglobin production can be reactivated pharmacologically, which is useful in the treatment of diseases such as hemoglobinopathies. For example, in certain patients with hemoglobinopathies, higher levels of gamma-globin expression can partially compensate for defective or impaired beta-globin gene production, which can ameliorate the clinical severity in these diseases. Increased HbF levels or F-cell (HbF containing erythrocyte) numbers can ameliorate the disease severity of hemoglobinopathies, e.g., beta- thalassemia major and sickle cell anemia.

### Sickle Cell Diseases

[0538] Sickle cell disease is a group of disorders that affects hemoglobin. People with this disorder have atypical hemoglobin molecules (hemoglobin S), which can distort red blood cells into a sickle, or crescent, shape. Characteristic features of this disorder include a low number of red blood cells (anemia), repeated infections, and periodic episodes of pain.

[0539] Mutations in the HBB gene cause sickle cell disease. The HBB gene provides instructions for making beta-globin. Various versions of beta-globin result from different mutations in the HBB gene. One particular HBB gene mutation produces an abnormal version of beta-globin known as hemoglobin S (HbS). Other mutations in the HBB gene lead to additional abnormal versions of beta-globin such as hemoglobin C (HbC) and hemoglobin E (HbE). HBB gene mutations can also result in an unusually low level of beta-globin, i.e., beta thalassemia.

[0540] In people with sickle cell disease, at least one of the beta-globin subunits in hemoglobin is replaced with hemoglobin S. In sickle cell anemia, which is a common form of sickle cell disease, hemoglobin S replaces both beta-globin subunits in hemoglobin. In other types of sickle cell disease, just one beta-globin subunit in hemoglobin is replaced with hemoglobin S. The other beta-globin subunit is replaced with a different abnormal variant, such as hemoglobin C. For example, people with sickle-hemoglobin C (HbSC) disease have hemoglobin molecules with hemoglobin S and hemoglobin C instead of beta-globin. If mutations that produce hemoglobin S and beta thalassemia occur together, individuals have hemoglobin S-beta thalassemia (HbSBetaThal) disease.

### Beta Thalassemia

[0541] Beta thalassemia is a blood disorder that reduces the production of hemoglobin. In people with beta thalassemia, low levels of hemoglobin lead to a lack of oxygen in many parts of the body. Affected individuals also have a shortage of red blood cells (anemia), which can cause pale skin, weakness, fatigue, and more serious complications. People with beta thalassemia are at an increased risk of developing abnormal blood clots.

[0542] Beta thalassemia is classified into two types depending on the severity of symptoms: thalassemia major (also known as Cooley’s anemia) and thalassemia intermedia. Of the two types, thalassemia major is more severe.

[0543] Mutations in the HBB gene cause beta thalassemia. The HBB gene provides instructions for making beta-globin. Some mutations in the HBB gene prevent the production of any beta- globin. The absence of beta-globin is referred to as beta-zero (B°) thalassemia. Other HBB gene mutations allow some beta-globin to be produced but in reduced amounts, i.e., beta-plus (B⁺) thalassemia. People with both types have been diagnosed with thalassemia major and thalassemia intermedia.

[0544] In an embodiment, a Cas9 molecule/gRNA molecule complex targeting a first gene or locus is used to treat a disorder characterized by a second gene, e.g., a mutation in a second gene. By way of example, targeting of the first gene, e.g., by editing or payload delivery, can compensate for, or inhibit further damage from, the affect of a second gene, e.g., a mutant second gene. In an embodiment the allele(s) of the first gene carried by the subject is not causative of the disorder.

[0545] In one aspect, the invention relates to the treatment of a mammal, e.g., a human, in need of increased fetal hemoglobin (HbF).

[0546] In one aspect, the invention relates to the treatment of a mammal, e.g., a human, that has been diagnosed with, or is at risk of developing, a hemoglobinopathy.

[0547] In one aspect, the hemoglobinopathy is a β -hemoglobinopathy. In one aspect, the hemoglobinopathy is sickle cell disease. In one aspect, the hemoglobinopathy is beta thalassemia.

### Methods of Treatment of Hemoglobinopathies

[0548] In another aspect the invention provides methods of treatment. In aspects, the gRNA molecules, CRISPR systems and/or cells of the invention are used to treat a patient in need thereof. In aspects, the patient is a mammal, e.g., a human. In aspects, the patient has a hemoglobinopathy. In embodiments, the patient has sickle cell disease. In embodiments, the patient has beta thalassemia.

[0549] In one aspect, the method of treatment comprises administering to a mammal, e.g., a human, one or more gRNA molecules, e.g., one or more gRNA molecules comprising a targeting domain described in Table 1, and one or more cas9 molecules described herein.

[0550] In one aspect, the method of treatment comprises administering to a mammal a cell population, wherein the cell population is a cell population from a mammal, e.g., a human, that has been administered one or more gRNA molecules, e.g., one or more gRNA molecules comprising a targeting domain described in Table 1, and one or more cas9 molecules described herein, e.g., a CRISPR system as described herein.

[0551] In one embodiment, the administration of the one or more gRNA molecules or CRISPR systems to the cell is accomplished in vivo. In one embodiment the administration of the one or more gRNA molecules or CRISPR systems to the cell is accomplished ex vivo.

[0552] In one aspect, the method of treatment comprises administering to the mammal, e.g., the human, an effective amount of a cell population comprising cells which comprise or at one time comprised one or more gRNA molecules, e.g., one or more gRNA molecules comprising a targeting domain described in Table 1, and one or more cas9 molecules described herein, or the progeny of said cells. In one embodiment, the cells are allogeneic to the mammal. In one embodiment, the cells are autologous to the mammal. In one embodiment the cells are harvested from the mammal, manipulated ex vivo, and returned to the mammal.

[0553] In aspects, the cells comprising or which at one time comprised one or more gRNA molecules, e.g., one or more gRNA molecules comprising a targeting domain described in Table 1, and one or more cas9 molecules described herein, or the progeny of said cells, comprise stem cells or progenitor cells. In one aspect, the stem cells are hematopoietic stem cells. In one aspect, the progenitor cells are hematopoietic progenitor cells. In one aspect, the cells comprise both hematopoietic stem cells and hematopoietic progenitor cells, e.g., are HSPCs. In one aspect, the cells comprise, e.g., consist of, CD34+ cells. In one aspect the cells are substantially free of CD34- cells. In one aspect, the cells comprise, e.g., consist of, CD34+/CD90+ stem cells. In one aspect, the cells comprise, e.g., consist of, CD34+/CD90- cells. In an aspect, the cells are a population comprising one or more of the cell types described above or described herein.

[0554] In one embodiment, the disclosure provides a method for treating a hemoglobinopathy, e.g., sickle cell disease or beta-thalassemia, or a method for increasing fetal hemoglobin expression in a mammal, e.g., a human, in need thereof, the method comprising:
[0555] a) providing, e.g., harvesting or isolating, a population of HSPCs (e.g., CD34+ cells) from a mammal;
[0556] b) providing said cells ex vivo, e.g., in a cell culture medium, optionally in the presence of an effective amount of a composition comprising at least one stem cell expander, whereby said population of HSPCs (e.g., CD34+ cells) expands to a greater degree than an untreated population;
[0557] c) contacting the population of HSPCs (e.g., CD34+ cells) with an effective amount of: a composition comprising at least one gRNA molecule comprising a targeting domain described herein, e.g., a targeting domain described in Table 1, or a nucleic acid encoding said gRNA molecule, and at least one cas9 molecule, e.g., described herein, or a nucleic acid encoding said cas9 molecule, e.g., one or more RNPs as described herein, e.g., with a CRISPR system described herein;
[0558] d) causing at least one modification in at least a portion of the cells of the population (e.g., at least a portion of the HSPCs, e.g., CD34+ cells, of the population), whereby, e.g., when said HSPCs are differentiated into cells of an erythroid lineage, e.g., red blood cells, fetal hemoglobin expression is increased, e.g., relative to cells not contacted according to step c); and
[0559] f) returning a population of cells comprising said modified HSPCs (e.g., CD34+ cells) to the mammal.

[0560] In an aspect, the HSPCs are allogeneic to the mammal to which they are returned. In an aspect, the HSPCs are autologous to the mammal to which they are returned. In aspects, the HSPCs are isolated from bone marrow. In aspects, the HSPCs are isolated from peripheral blood, e.g., mobilized peripheral blood. In aspects, the moblized peripheral blood is isolated from a subject who has been administered a G-CSF. In aspects, the moblized peripheral blood is isolated from a subject who has been administered a moblization agent other than G-CSF, for example, Plerixafor® (AMD3100). In other aspects, the mobilized peripheral blood is isolated from a subject who has been administered a combination of G-CSF and Plerixafor® (AMD3100)). In aspects, the HSPCs are isolated from umbilical cord blood. In embodiments, the cells are derived from a hemoglobinopathy patient, for example a patient with sickle cell disease or a patient with a thalassemia, e.g., beta-thalassemia.

[0561] In further embodiments of the method, the method furhter comprises, after providing a population of HSPCs (e.g., CD34+ cells), e.g., from a source described above, the step of enriching the population of cells for HSPCs (e.g., CD34+ cells). In embodiments of the method, after said enriching, the population of cells, e.g., HSPCs, is substantially free of CD34- cells.

[0562] In embodiments, the population of cells which is returned to the mammal includes at least 70% viable cells. In embodiments, the population of cells which is returned to the mammal includes at least 75% viable cells. In embodiments, the population of cells which is returned to the mammal includes at least 80% viable cells. In embodiments, the population of cells which is returned to the mammal includes at least 85% viable cells. In embodiments, the population of cells which is returned to the mammal includes at least 90% viable cells. In embodiments, the population of cells which is returned to the mammal includes at least 95% viable cells. In embodiments, the population of cells which is returned to the mammal includes at least 99% viable cells. Viability can be determined by staining a representative portion of the population of cells for a cell viability marker, e.g., as known in the art.

[0563] In another embodiment, the disclosure provides a method for treating a hemoglobinopathy, e.g., sickle cell disease or beta-thalassemia, or a method for increasing fetal hemoglobin expression in a mammal, e.g., a human, in need thereof, the method comprising the steps of:
[0564] a) providing, e.g., harvesting or isolating, a population of HSPCs (e.g., CD34+ cells) of a mammal, e.g., from the bone marrow of a mammal;
[0565] b) isolating the CD34+ cells from the population of cells of step a);
[0566] c) providing said CD34+ cells ex vivo, and culturing said cells, e.g., in a cell culture medium, in the presence of an effective amount of a composition comprising at least one stem cell expander, e.g., (S)-2-(6-(2-(1H-indol-3-yl)ethylamino)-2-(5-fluoropyridin-3-yl)-9H-purin-9-yl)propan-l-ol, e.g., (S)-2-(6-(2-(1H-indol-3-yl)ethylamino)-2-(5-fluoropyridin-3-yl)-9H-purin-9-yl)propan-l-ol at a concentration of about 0.5 to about 0.75 micromolar, whereby said population of CD34+ cells expands to a greater degree than an untreated population;
[0567] d) introducing into the cells of the population CD34+ cells an effective amount of: a composition comprising a Cas9 molecule, e.g., as described herein, and a gRNA molecule, e.g., as described herein, e.g., optionally where the Cas9 molecule and the gRNA molecule are in the form of an RNP, e.g., as dsecribed herein, and optionally where said introduction is by electroporation, e.g., as desecribed herein, of said RNP into said cells;
[0568] e) causing at least one genetic modification in at least a portion of the cells of the population (e.g., at least a portion of the HSPCs, e.g., CD34+ cells, of the population), whereby an indel, e.g., as described herein, is created at or near the genomic site complementary to the targeting domain of the gRNA introduced in step d);
[0569] f) optionally, additionallly culturing said cells after said introducing, e.g., in a cell culture medium, in the presence of an effective amount of a composition comprising at least one stem cell expander, e.g., (S)-2-(6-(2-(1H-indol-3-yl)ethylamino)-2-(5-fluoropyridin-3-yl)-9H-purin-9-yl)propan-1-ol, e.g., (S)-2-(6-(2-(1H-indol-3-yl)ethylamino)-2-(5-fluoropyridin-3-yl)-9H-purin-9-yl)propan-1-ol at a concentration of about 0.5 to about 0.75 micromolar, such that the cells expand at least 2-fold, e.g., at least 4-fold, e.g., at least 5-fold;
[0570] g) cryopreserving said cells; and
[0571] h) returning the cells to the mammal, wherein,
   [0572] the cells returned to the mammal comprise cells that 1) maintain the ability to differentiate into cells of the erythroid lineage, e.g., red blood cells; 2) when differentiated into red blood cells, produce an increased level of fetal hemoglobin, e.g., relative to cells unmodified by the gRNA of step e), e.g., produce at least 6 picograms fetal hemoglobin per cell.

[0573] In an aspect, the HSPCs are allogeneic to the mammal to which they are returned. In an aspect, the HSPCs are autologous to the mammal to which they are returned. In aspects, the HSPCs are isolated from bone marrow. In aspects, the HSPCs are isolated from peripheral blood, e.g., mobilized peripheral blood. In aspects, the moblized peripheral blood is isolated from a subject who has been administered a G-CSF. In aspects, the moblized peripheral blood is isolated from a subject who has been administered a moblization agent other than G-CSF, for example, Plerixafor® (AMD3100). In other aspects, the mobilized peripheral blood is isolated from a subject who has been administered a combination of G-CSF and Plerixafor® (AMD3100)). In aspects, the HSPCs are isolated from umbilical cord blood. In embodiments, the cells are derived from a hemoglobinopathy patient, for example a patient with sickle cell disease or a patient with a thalassemia, e.g., beta-thalassemia.

[0574] In embodiments of the method above, the recited step b) results in a population of cells which is substantially free of CD34- cells.

[0575] In further embodiments of the method, the method further comprises, after providing a population of HSPCs (e.g., CD34+ cells), e.g., from a source described above, the population of cells is enriched for HSPCs (e.g., CD34+ cells).

[0576] In a further embodiments of these methods, the population of modified HSPCs (e.g., CD34+ stem cells) having the ability to differentiate with increased fetal hemoglobin expression is cryopreserved and stored prior to being reintroduced into the mammal. In embodiments, the cryopreserved population of HSPCs having the ability to differentiate into cells of the erythroid lineage, e.g., red blood cells, and/or when differentiated into cells of the erythroid lineage, e.g., red blood cells, produce an increased level of fetal hemoglobin is thawed and then reintroduced into the mammal. In a further embodiment of these methods, the method comprises chemotherapy and/or radiation therapy to remove or reduce the endogenous hematopoietic progenitor or stem cells in the mammal. In a further embodiment of these methods, the method does not comprise a step of chemotherapy and/or radiation therapy to remove or reduce the endogenous hematopoietic progenitor or stem cells in the mammal. In a further embodiment of these methods, the method comprises a chemotherapy and/or radiation therapy to reduce partially (e.g., partial lymphodepletion) the endogenous hematopoietic progenitor or stem cells in the mammal. In embodiments the patient is treated with a fully lymphodepleting dose of busulfan prior to reintroduction of the modified HSPCs to the mammal. In embodiments, the patient is treated with a partially lymphodepleting dose of busulfan prior to reintroduction of the modified HSPCs to the mammal. In embodiments, the patient is treated with HSC-targeted antibody-drug conjugates for conditioning. In embodiments, such HSC-targeted antibody-drug conjugates can be found in WO2018071871, the contents of which are incoporated herein by reference.

[0577] In embodiments, the cells are contacted with RNP comprising a Cas9 molecule, e.g., as described herein, complexed with a gRNA to WIZ, e.g., as described herein (e.g., comprising a targeting domain listed in Table 1-Table 3.

[0578] In embodiments, the stem cell expander is Compound 1. In embodiments, the stem cell expander is Compound 2. In embodiments, the stem cell expander is Compound 3. In embodiments, the stem cell expander is (S)-2-(6-(2-(1H-indol-3-yl)ethylamino)-2-(5-fluoropyridin-3-yl)-9H-purin-9-yl)propan-1-ol. In embodiments, the stem cell expander is (S)-2-(6-(2-(lH-indol-3-yl)ethylamino)-2-(5-fluoropyridin-3-yl)-9H-purin-9-yl)propan-1-ol and is present at a concentration of 2-0.1 micromolar, e.g., 1-0.25 micromolar, e.g., 0.75-0.5 micromolar. In embodiments, the stem cell expander is a molecule described in WO2010/059401 (e.g., the molecule described in Example 1 of WO2010/059401).

[0579] In embodiments, the cells, e.g., HSPCs, e.g., as described herein, are cultured ex vivo for a period of about 1 hour to about 15 days, e.g., a period of about 12 hours to about 12 days, e.g., a period of about 12 hours to 4 days, e.g., a period of about 1 day to about 4 days, e.g., a period of about 1 day to about 2 days, e.g., a period of about 1 day or a period of about 2 days, prior to the step of contacting the cells with a CRISPR system, e.g., described herein. In embodiments, said culturing prior to said contacting step is in a composition (e.g., a cell culture medium) comprising a stem cell expander, e.g., described herein, e.g., (S)-2-(6-(2-(1H-indol-3-yl)ethylamino)-2-(5-fluoropyridin-3-yl)-9H-purin-9-yl)propan-1-ol, e.g., (S)-2-(6-(2-(1H-indol-3-yl)ethylamino)-2-(5-fluoropyridin-3-yl)-9H-purin-9-yl)propan-1-ol at a concentration of about 0.25 uM to about 1 uM, e.g., (S)-2-(6-(2-(lH-indol-3-yl)ethylamino)-2-(5-fluoropyridin-3-yl)-9H-purin-9-yl)propan-1-ol at a concentration of about 0.75-0.5 micromolar. In embodiments, the cells are cultured ex vivo for a period of no more than about about 1 day, e.g., no more than about 18, 17, 16, 15, 14, 13, 12, 11, 10, 9, 8, 7, 6, 5, 4, 3, 2, or 1 hour(s) after the step of contacting the cells with a CRISPR system, e.g., described herein, e.g., in a cell culture medium which comprises a stem cell expander, e.g., described herein, e.g., (S)-2-(6-(2-(lH-indol-3-yl)ethylamino)-2-(5-fluoropyridin-3-yl)-9H-purin-9-yl)propan-1-ol, e.g., (S)-2-(6-(2-(lH-indol-3-yl)ethylamino)-2-(5-fluoropyridin-3-yl)-9H-purin-9-yl)propan-1-ol at a concentration of about 0.25 uM to about 1 uM, e.g., (S)-2-(6-(2-(1H-indol-3-yl)ethylamino)-2-(5-fluoropyridin-3-yl)-9H-purin-9-yl)propan-1-ol at a concentration of about 0.75-0.5 micromolar. In other embodiments, the cells are cultured ex vivo for a period of about 1 hour to about 15 days, e.g., a period of about 12 hours to about 10 days, e.g., a period of about 1 day to about 10 days, e.g., a period of about 1 day to about 5 days, e.g., a period of about 1 day to about 4 days, e.g., a period of about 2 days to about 4 days, e.g., a period of about 2 days, about 3 days or about 4 days, after the step of contacting the cells with a CRISPR system, e.g., described herein, in a cell culture medium, e.g., which comprises a stem cell expander, e.g., described herein, e.g., (S)-2-(6-(2-(1H-indol-3-yl)ethylamino)-2-(5-fluoropyridin-3-yl)-9H-purin-9-yl)propan-1-ol, e.g., (S)-2-(6-(2-(1H-indol-3-yl)ethylamino)-2-(5-fluoropyridin-3-yl)-9H-purin-9-yl)propan-1-ol at a concentration of about 0.25 uM to about 1 uM, e.g., (S)-2-(6-(2-(lH-indol-3-yl)ethylamino)-2-(5-fluoropyridin-3-yl)-9H-purin-9-yl)propan-1-ol at a concentration of about 0.75-0.5 micromolar. In embodiments, the cells are cultured ex vivo (e.g., cultured prior to said contacting step and/or cultured after said contacting step) for a period of about 1 hour to about 20 days, e.g., a period of about 6-12 days, e.g., a period of about 6, about 7, about 8, about 9, about 10, about 11, or about 12 days.

[0580] In embodiments, the population of cells comprising the modified HSPCs returned to the mammal comprises at least about 1 million cells (e.g., at least about 1 million CD34+ cells) per kg. In embodiments, the population of cells comprising the modified HSPCs returned to the mammal comprises at least about 2 million cells (e.g., at least about 2 million CD34+ cells) per kg. In embodiments, the population of cells comprising the modified HSPCs returned to the mammal comprises at least about 3 million cells (e.g., at least about 3 million CD34+ cells) per kg. In embodiments, the population of cells comprising the modified HSPCs returned to the mammal comprises at least about 4 million cells (e.g., at least about 4 million CD34+ cells) per kg. In embodiments, the population of cells comprising the modified HSPCs returned to the mammal comprises at least about 5 million cells (e.g., at least about 5 million CD34+ cells) per kg. In embodiments, the population of cells comprising the modified HSPCs returned to the mammal comprises at least about 6 million cells (e.g., at least about 6 million CD34+ cells) per kg. In embodiments, the population of cells comprising the modified HSPCs returned to the mammal comprises at least 1 million cells (e.g., at least 1 million CD34+ cells) per kg. In embodiments, the population of cells comprising the modified HSPCs returned to the mammal comprises at least 2 million cells (e.g., at least 2 million CD34+ cells) per kg. In embodiments, the population of cells comprising the modified HSPCs returned to the mammal comprises at least 3 million cells (e.g., at least 3 million CD34+ cells) per kg. In embodiments, the population of cells comprising the modified HSPCs returned to the mammal comprises at least 4 million cells (e.g., at least 4 million CD34+ cells) per kg. In embodiments, the population of cells comprising the modified HSPCs returned to the mammal comprises at least 5 million cells (e.g., at least 5 million CD34+ cells) per kg. In embodiments, the population of cells comprising the modified HSPCs returned to the mammal comprises at least 6 million cells (e.g., at least 6 million CD34+ cells) per kg. In embodiments, the population of cells comprising the modified HSPCs returned to the mammal comprises about 1 million cells (e.g., about 1 million CD34+ cells) per kg. In embodiments, the population of cells comprising the modified HSPCs returned to the mammal comprises about 2 million cells (e.g., about 2 million CD34+ cells) per kg. In embodiments, the population of cells comprising the modified HSPCs returned to the mammal comprises about 3 million cells (e.g., about 3 million CD34+ cells) per kg. In embodiments, the population of cells comprising the modified HSPCs returned to the mammal comprises about 4 million cells (e.g., about 4 million CD34+ cells) per kg. In embodiments, the population of cells comprising the modified HSPCs returned to the mammal comprises about 5 million cells (e.g., about 5 million CD34+ cells) per kg. In embodiments, the population of cells comprising the modified HSPCs returned to the mammal comprises about 6 million cells (e.g., about 6 million CD34+ cells) per kg. In embodiments, the population of cells comprising the modified HSPCs returned to the mammal comprises about 2 × 10⁶ cells (e.g., about 2 × 10⁶ CD34+ cells) per kg body weight of the patient. In embodiments, the population of cells comprising the modified HSPCs returned to the mammal comprises at least 2 × 10⁶ cells (e.g., about 2 × 10⁶ CD34+ cells) per kg body weight of the patient. In embodiments, the population of cells comprising the modified HSPCs returned to the mammal comprises between 2 × 10⁶ cells (e.g., about 2 × 10⁶ CD34+ cells) per kg body weight of the patient and 10 × 10⁶ cells (e.g., about 2 × 10⁶ CD34+ cells) per kg body weight of the patient. In embodiments, the cells comprising the modified cells are infused into the patient. In embodiments, before the cells comprising the modified HSPCs are infused into the patient, the patient is treated with a lymphodepleting therapy, for example, is treated with busulphan, for example is treated with a full lymphodepleting busulphan regimen, or for example is treated with a reduced intensity busulphan lymphodepleting regimen.

[0581] In embodiments, any of the methods described above results in the patient having at least 80% of its circulating CD34+ cells comprising an indel at or near the genomic site complementary to the targeting domain of the gRNA molecule used in the method, e.g., as measured at least 15 days, e.g., at least 20, at least 30, at least 40 at least 50 or at least 60 days after reintroduction of the cells into the mammal. Without being bound by theory, it has surprisingly been discovered herein that indels and indel patterns (including large deletions) observed when gene editing systems, e.g., CRISPR systems, e.g., CRISPR systems comprising a gRNA molecule targeting the WIZ gene region, e.g., as described herein, are introduced into HSPCs, and those cells are transplanted into organisms, certain gRNAs produce cells comprising indels and indel patterns (including large indels) that remain detectible in the edited cell population and its progeny, in the organism, and persist for more than 8 weeks, 12 weeks, 16 weeks or 20 weeks. Without being bound by theory, a cell population comprising an indel pattern or particular indel (including large deletion) that persists within a detectible cell population, for example, longer than 16 weeks or longer than 20 weeks after introduction into an organism (e.g., a patient), could be beneficial to producing a longer-term amelioration of a disease or condition, e.g. described herein (e.g., a hemoglobinopathy, e.g., sickle cell disease or a thalassemia) than cells (or their progeny) that upon introduction into an organism or patient lose one or more indels (including large deletions). In embodiments, the persisting indel or indel pattern is associated with upregulated fetal hemoglobin (e.g., in erythroid progeny of said cells). Thus, in embodiments, the present disclosure provides populations of cells, e.g., HSPCs, e.g., as described herein, which comprise one or more indels (including large deletions) which persist (e.g., remain detectible, e.g., in a cell population or its progeny) in the blood and/or bone marrow) for more than 8 weeks, more than 12 weeks, more than 16 weeks or more than 20 weeks after introduction into an organism, e.g., patient.

[0582] In embodiments, any of the methods described above results in the patient having at least 20% of its bone marrow CD34+ cells comprising an indel at or near the genomic site complementary to the targeting domain of the gRNA molecule used in the method, e.g., as measured at least 15 days, e.g., at least 20, at least 30, at least 40 at least 50 or at least 60 days after reintroduction of the cells into the mammal.

[0583] In embodiments, the HSPCs that are reintroduced into the mammal are able to differentiate in vivo into cells of the erythroid lineage, e.g., red blood cells, and said differentiated cells exhibit increased fetal hemoglobin levels, e.g., produce at least 6 picograms fetal hemoglobin per cell, e.g., at least 7 picograms fetal hemoglobin per cell, at least 8 picograms fetal hemoglobin per cell, at least 9 picograms fetal hemoglobin per cell, at least 10 picograms fetal hemoglobin per cell, e.g., between about 9 and about 10 picograms fetal hemoglobin per cell, e.g., such that the hemoglobinopathy is treated the mammal.

[0584] It will be understood that when a cell is characterized as having increased fetal hemoglobin, that includes embodiments in which a progeny, e.g., a differentiated progeny, of that cell exhibits increased fetal hemoglobin. For example, in the methods described herein, the altered or modified CD34+ cell (or cell population) may not express increased fetal hemoglobin, but when differentiated into cells of erythroid lineage, e.g., red blood cells, the cells express increased fetal hemoglobin, e.g., increased fetal hemoglobin relative to an unmodified or unaltered cell under similar conditions.

### XI. Culture Methods and Methods of Manufacturing Cells

[0585] The disclosure provides methods of culturing cells, e.g., HSPCs, e.g., hematopoietic stem cells, e.g., CD34+ cells modified, or to be modified, with the gRNA molecules described herein.

### DNA Repair Pathway Inhibitors

[0586] Without being bound by theory, it is believed that the pattern of indels produced by a given gRNA molecule at a particular target sequence is a product of each of the active DNA repair mechamisms within the cell (e.g., non-homologous end joining, microhomology-mediated end joining, etc.). Wihtout being bound by theory, it is believed that a particularlyfavorable indel may be selected for or enriched for by contacting the cells to be edited with an inhibitor of a DNA repair pathway that does not produce the desired indel. Thus, the gRNA molecules, CRISPR systems, methods and other aspects of the invention may be perfomred in combination with such inhibitors. Examples of such inhibitors include those described in, e.g., WO2014/130955, the contents of which are hereby incorproated by reference in their entirety. In embodiment, the inhibitor is a DNAPKc inhibitor, e.g., NU7441.

### Stem Cell Expanders

[0587] In one aspect the invention relates to culturing the cells, e.g., HSPCs, e.g., CD34+ cells modified, or to be modified, with the gRNA molecules described herein, with one or more agents that result in an increased expansion rate, increased expansion level, or increased engraftment relative to cells not treated with the agent. Such agents are referred to herein as stem cell expanders.

[0588] In an aspect, the one or more agents that result in an increased expansion rate or increased expansion level, relative to cells not treated with the agent, e.g., the stem cell expander, comprises an agent that is an antagonist of the aryl hydrocarbon receptor (AHR) pathway. In aspects, the stem cell expander is a compound disclosed in WO2013/110198 or a compound disclosed in WO2010/059401, the contents of which are incorporated by reference in their entirety.

[0589] In one aspect, the one or more agents that result in an increased expansion rate or increased expansion level, relative to cells not treated with the agent, is a pyrimido[4,5-b]indole derivative, e.g., as disclosed in WO2013/110198, the contents of which are hereby incorporated by reference in their entirety. In one embodiment the agent is compound 1 ((1r,4r)-N¹-(2-benzyl-7-(2-methyl-2H-tetrazol-5-yl)-9H-pyrimido[4,5-b]indol-4-yl)cyclohexane-1,4-diamine):

[chemical structure]

[0590] In another aspect, the agent is Compound 2 (methyl 4-(3-piperidin-1-ylpropylamino)-9H-pyrimido[4,5-b] indole-7-carboxylate):

[chemical structure]

[0591] In another aspect, the one or more agents that result in an increased expansion rate or increased expansion level, relative to cells not treated with the agent, is an agent disclosed in WO2010/059401, the contents of which are hereby incorporated by reference in their entirety.

[0592] In one embodiment, the stem cell expander is compound 3: 4-(2-(2-(benzo[b]thiophen-3-yl)-9-isopropyl-9H-purin-6-ylamino)ethyl)phenol, i.e., is the compound from example 1 of WO2010/059401, having the following structure:

[chemical structure]

[0593] In another aspect, the stem cell expander is (S)-2-(6-(2-(1H-indol-3-yl)ethylamino)-2-(5-fluoropyridin-3-yl)-9H-purin-9-yl)propan-l-ol ((S)-2-(6-(2-(lH-indol-3-yl)ethylamino)-2-(5-fluoropyridin-3-yl)-9H-purin-9-yl)propan-l-ol, i.e., is the compound 157S according to WO2010/059401), having the following structure:

### (S)(6-(2-(1H-indol-3-yl)ethylamino)(5-fluoropyridin-3-yl)-9H-purin-9-yl)propan-1-ol:

[chemical structure]

[0595] In embodiments the population of HSPCs is contacted with the stem cell expander, e.g., compound 1, compound 2, compound 3, (S)-2-(6-(2-(1H-indol-3-yl)ethylamino)-2-(5-fluoropyridin-3-yl)-9H-purin-9-yl)propan-l-ol, or combinations thereof (e.g., a combination of compound 1 and (S)-2-(6-(2-(1H-indol-3-yl)ethylamino)-2-(5-fluoropyridin-3-yl)-9H-purin-9-yl)propan-1-ol) before introduction of the CRISPR system (e.g., gRNA molecule and/or Cas9 molecule of the invention) to said HSPCs. In embodiements, the population of HSPCs is contacted with the stem cell expander, e.g., compound 1 compound 2, compound 3, (S)-2-(6-(2-(lH-indol-3-yl)ethylamino)-2-(5-fluoropyridin-3-yl)-9H-purin-9-yl)propan-l-ol, or combinations thereof (e.g., a combination of compound 1 and (S)-2-(6-(2-(1H-indol-3-yl)ethylamino)-2-(5-fluoropyridin-3-yl)-9H-purin-9-yl)propan-1-ol), after introduction of the CRISPR system (e.g., gRNA molecule and/or Cas9 molecule of the invention) to said HSPCs. In embodiments, the population of HSPCs is contacted with the stem cell expander, e.g., compound 1, compound 2, compound 3, (S)-2-(6-(2-(1H-indol-3-yl)ethylamino)-2-(5-fluoropyridin-3-yl)-9H-purin-9-yl)propan-l-ol, or combinations thereof (e.g., a combination of compound 1 and (S)-2-(6-(2-(1H-indol-3-yl)ethylamino)-2-(5-fluoropyridin-3-yl)-9H-purin-9-yl)propan-1-ol), both before and after introduction of the CRISPR system (e.g., gRNA molecule and/or Cas9 molecule of the invention) to said HSPCs.

[0596] In embodiments, the stem cell expander is present in an effective amount to increase the expansion level of the HSPCs, relative to HSPCs in the same media but for the absence of the stem cell expander. In embodimetns, the stem cell expander is present at a concentration ranging from about 0.01 to about 10 uM, e.g., from about 0.1 uM to about 1 uM. In embodiments, the stem cell expander is present in the cell culture medium at a concentration of about 1 uM, about 950 nM, about 900 nM, about 850 nM, about 800 nM, about 750 nM, about 700 nM, about 650 nM, about 600 nM, about 550 nM, about 500 nM, about 450 nM, about 400 nM, about 350 nM, about 300 nM, about 250 nM, about 200 nM, about 150 nM, about 100 nM, about 50 nM, about 25 nM, or about 10 nM. In embodiments, the stem cell expander is present at a concentration ranging from about 500 nM to about 750 nM.

[0597] In embodiments, the stem cell expander is (S)-2-(6-(2-(1H-indol-3-yl)ethylamino)-2-(5-fluoropyridin-3-yl)-9H-purin-9-yl)propan-l-ol, which is present in the cell culture medium at a concentration ranging from about 0.01 to about 10 micromolar (uM). In embodiments, the stem cell expander is (S)-2-(6-(2-(1H-indol-3-yl)ethylamino)-2-(5-fluoropyridin-3-yl)-9H-purin-9-yl)propan-1-ol, which is present in the cell culture medium at a concentration ranging from about 0.1 to about 1 micromolar (uM). In embodiments, the stem cell expander is (S)-2-(6-(2-(1H-indol-3-yl)ethylamino)-2-(5-fluoropyridin-3-yl)-9H-purin-9-yl)propan-l-ol, which is present in the cell culture medium at a concentration of about 0.75 micromolar (uM). In embodiments, the stem cell expander is (S)-2-(6-(2-(lH-indol-3-yl)ethylamino)-2-(5-fluoropyridin-3-yl)-9H-purin-9-yl)propan-1-ol, which is present in the cell culture medium at a concentration of about 0.5 micromolar (uM). In embodiments of any of the foregoing, the cell culture medium additionally comprises compound 1.

[0598] In embodiments, the stem cell expander is a mixture of compound 1 and (S)-2-(6-(2-(lH-indol-3-yl)ethylamino)-2-(5-fluoropyridin-3-yl)-9H-purin-9-yl)propan-1-ol.

[0599] In embodiments, the cells of the invention are contacted with one or more stem cell expander molecules for a sufficient time and in a sufficient amount to cause a 2 to 10,000-fold expansion of CD34+ cells, e.g., a 2-1000-fold expansion of CD34+ cells, e.g., a 2-100-fold expansion of CD34+ cells, e.g., a 20-200-fold expansion of CD34+ cells. As described herein, the contacting with the one or more stem cell expanders may be before the cells are contacted with a CRISPR system, e.g., as described herein, after the cells are contacted with a CRISPR system, e.g., as described herein, or a combination thereof. In an embodiment, the cells are contacted with one or more stem cell expander molecules, e.g., (S)-2-(6-(2-(1H-indol-3-yl)ethylamino)-2-(5-fluoropyridin-3-yl)-9H-purin-9-yl)propan-1-ol, for a sufficient time and in a sufficient amount to cause at least a 2-fold expansion of CD34+ cells, e.g., CD34+ cells comprising an indel at or near the target site having complementarity to the targeting domain of the gRNA of the CRISPR/Cas9 system introduced into said cell. In an embodiment, the cells are contacted with one or more stem cell expander molecules, e.g., (S)-2-(6-(2-(lH-indol-3-yl)ethylamino)-2-(5-fluoropyridin-3-yl)-9H-purin-9-yl)propan-l-ol, for a sufficient time and in a sufficient amount to cause at least a 4-fold expansion of CD34+ cells, e.g., CD34+ cells comprising an indel at or near the target site having complementarity to the targeting domain of the gRNA of the CRISPR/Cas9 system introduced into said cell. In an embodiment, the cells are contacted with one or more stem cell expander molecules, e.g., (S)-2-(6-(2-(lH-indol-3-yl)ethylamino)-2-(5-fluoropyridin-3-yl)-9H-purin-9-yl)propan-l-ol, for a sufficient time and in a sufficient amount to cause at least a 5-fold expansion of CD34+ cells, e.g., CD34+ cells comprising an indel at or near the target site having complementarity to the targeting domain of the gRNA of the CRISPR/Cas9 system introduced into said cell. In an embodiment, the cells are contacted with one or more stem cell expander molecules for a sufficient time and in a sufficient amount to cause at least a 10-fold expansion of CD34+ cells. In an embodiment, the cells are contacted with one or more stem cell expander molecules for a sufficient time and in a sufficient amount to cause at least a 20-fold expansion of CD34+ cells. In an embodiment, the cells are contacted with one or more stem cell expander molecules for a sufficient time and in a sufficient amount to cause at least a 30-fold expansion of CD34+ cells. In an embodiment, the cells are contacted with one or more stem cell expander molecules for a sufficient time and in a sufficient amount to cause at least a 40-fold expansion of CD34+ cells. In an embodiment, the cells are contacted with one or more stem cell expander molecules for a sufficient time and in a sufficient amount to cause at least a 50-fold expansion of CD34+ cells. In an embodiment, the cells are contacted with one or more stem cell expander molecules for a sufficient time and in a sufficient amount to cause at least a 60-fold expansion of CD34+ cells. In embodiments, the cells are contacted with the one or more stem cell expanders for a period of about 1-60 days, e.g., about 1-50 days, e.g., about 1-40 days, e.g., about 1-30 days, e.g., 1-20 days, e.g., about 1-10 days, e.g., about 7 days, e.g., about 1-5 days, e.g., about 2-5 days, e.g., about 2-4 days, e.g., about 2 days or, e.g., about 4 days.

[0600] In embodiments, the cells, e.g., HSPCs, e.g., as described herein, are cultured ex vivo for a period of about 1 hour to about 10 days, e.g., a period of about 12 hours to about 5 days, e.g., a period of about 12 hours to 4 days, e.g., a period of about 1 day to about 4 days, e.g., a period of about 1 day to about 2 days, e.g., a period of about 1 day or a period of about 2 days, prior to the step of contacting the cells with a CRISPR system, e.g., described herein. In embodiments, said culturing prior to said contacting step is in a composition (e.g., a cell culture medium) comprising a stem cell expander, e.g., described herein, e.g., (S)-2-(6-(2-(1H-indol-3-yl)ethylamino)-2-(5-fluoropyridin-3-yl)-9H-purin-9-yl)propan-1-ol, e.g., (S)-2-(6-(2-(1H-indol-3-yl)ethylamino)-2-(5-fluoropyridin-3-yl)-9H-purin-9-yl)propan-1-ol at a concentration of about 0.25 uM to about 1 uM, e.g., (S)-2-(6-(2-(lH-indol-3-yl)ethylamino)-2-(5-fluoropyridin-3-yl)-9H-purin-9-yl)propan-1-ol at a concentration of about 0.75-0.5 micromolar. In embodiments, the cells are cultured ex vivo for a period of no more than about about 1 day, e.g., no more than about 18, 17, 16, 15, 14, 13, 12, 11, 10, 9, 8, 7, 6, 5, 4, 3, 2, or 1 hour(s) after the step of contacting the cells with a CRISPR system, e.g., described herein, e.g., in a cell culture medium which comprises a stem cell expander, e.g., described herein, e.g., (S)-2-(6-(2-(lH-indol-3-yl)ethylamino)-2-(5-fluoropyridin-3-yl)-9H-purin-9-yl)propan-1-ol, e.g., (S)-2-(6-(2-(lH-indol-3-yl)ethylamino)-2-(5-fluoropyridin-3-yl)-9H-purin-9-yl)propan-1-ol at a concentration of about 0.25 uM to about 1 uM, e.g., (S)-2-(6-(2-(1H-indol-3-yl)ethylamino)-2-(5-fluoropyridin-3-yl)-9H-purin-9-yl)propan-1-ol at a concentration of about 0.75-0.5 micromolar. In other embodiments, the cells are cultured ex vivo for a period of about 1 hour to about 14 days, e.g., a period of about 12 hours to about 10 days, e.g., a period of about 1 day to about 10 days, e.g., a period of about 1 day to about 5 days, e.g., a period of about 1 day to about 4 days, e.g., a period of about 2 days to about 4 days, e.g., a period of about 2 days, about 3 days or about 4 days, after the step of contacting the cells with a CRISPR system, e.g., described herein, in a cell culture medium, e.g., which comprises a stem cell expander, e.g., described herein, e.g., (S)-2-(6-(2-(1H-indol-3-yl)ethylamino)-2-(5-fluoropyridin-3-yl)-9H-purin-9-yl)propan-1-ol, e.g., (S)-2-(6-(2-(1H-indol-3-yl)ethylamino)-2-(5-fluoropyridin-3-yl)-9H-purin-9-yl)propan-1-ol at a concentration of about 0.25 uM to about 1 uM, e.g., (S)-2-(6-(2-(lH-indol-3-yl)ethylamino)-2-(5-fluoropyridin-3-yl)-9H-purin-9-yl)propan-1-ol at a concentration of about 0.75-0.5 micromolar.

[0601] In embodiments, the cell culture medium is a chemically defined medium. In embodiments, the cell culture medium may additionally contain, for example, StemSpan SFEM (StemCell Technologies; Cat no. 09650). In embodiments, the cell culture medium may alternatively or additionally contain, for example, HSC Brew, GMP (Miltenyi). In embodiments, the cell culture media is serum free. In embodiments, the media may be supplemented with thrombopoietin (TPO), human Flt3 ligand (Flt-3L), human stem cell factor (SCF), human interleukin-6, L-glutamine, and/or penicillin/streptomycin. In embodiments, the media is supplemented with thrombopoietin (TPO), human Flt3 ligand (Flt-3L), human stem cell factor (SCF), human interleukin-6, and L-glutamine. In other embodiments, the media is supplemented with thrombopoietin (TPO), human Flt3 ligand (Flt-3L), human stem cell factor (SCF), and human interleukin-6. In other embodiments the media is supplemented with thrombopoietin (TPO), human Flt3 ligand (Flt-3L), and human stem cell factor (SCF), but not human interleukin-6. In other embodiments, the media is supplemented with human Flt3 ligand (Flt-3L), human stem cell factor

[0602] (SCF), but not human thrombopoietin (TPO) or human interleukin-6. When present in the medium, the thrombopoietin (TPO), human Flt3 ligand (Flt-3L), human stem cell factor (SCF), human interleukin-6, and/or L-glutamine are each present in a concentration ranging from about 1 ng/mL to about 1000 ng/mL, e.g., a concentration ranging from about 10 ng/mL to about 500 ng/mL, e.g., a concentration ranging from about 10 ng/mL to about 100 ng/mL, e.g., a concentration ranging from about 25 ng/mL to about 75 ng/mL, e.g., a concentration of about 50 ng/mL. In embodiments, each of the supplemented components is at the same concentration. In other embodiments, each of the supplemented components is at a different concentration. In an embodiment, the medium comprises StemSpan SFEM (StemCell Technologies; Cat no. 09650), 50 ng/mL of thrombopoietin (Tpo), 50 ng/mL of human Flt3 ligand (Flt-3L), 50 ng/mL of human stem cell factor (SCF), and 50 ng/mL of human interleukin-6 (IL-6). In an embodiment, the medium comprises StemSpan SFEM (StemCell Technologies; Cat no. 09650), 50 ng/mL of thrombopoietin (Tpo), 50 ng/mL of human Flt3 ligand (Flt-3L), and 50 ng/mL of human stem cell factor (SCF), and does not comprise IL-6. In embodiments, the media further comprises a stem cell expander, e.g., (S)-2-(6-(2-(1H-indol-3-yl)ethylamino)-2-(5-fluoropyridin-3-yl)-9H-purin-9-yl)propan-l-ol, e.g., (S)-2-(6-(2-(1H-indol-3-yl)ethylamino)-2-(5-fluoropyridin-3-yl)-9H-purin-9-yl)propan-1-ol at a concentration of 0.75 µM. In embodiments, the media further comprises a stem cell expander, e.g., (S)-2-(6-(2-(1H-indol-3-yl)ethylamino)-2-(5-fluoropyridin-3-yl)-9H-purin-9-yl)propan-1-ol, e.g., (S)-2-(6-(2-(1H-indol-3-yl)ethylamino)-2-(5-fluoropyridin-3-yl)-9H-purin-9-yl)propan-1-ol at a concentration of 0.5 µM. In embodiments, the media further comprises 1% L-glutamine and 2% penicillin/streptomycin. In embodiments, the cell culture medium is serum free.

### XII. Combination Therapy

[0603] The present disclosure contemplates the use of the gRNA molecules described herein, or cells (e.g., hematopoietic stem cells, e.g., CD34+ cells) modified with the gRNA molecules described herein, in combination with one or more other therapeutic modalities and/or agents. Thus, in addition to the use of the gRNA molecules or cells modified with the gRNA molecules described herein, one may also administer to the subject one or more “standard” therapies for treating hemoglobinopathies.

[0604] The one or more additional therapies for treating hemoglobinopathies may include, for example, additional stem cell transplantation, e.g., hematopoietic stem cell transplantation. The stem cell transplantation may be allogeneic or autologous.

[0605] The one or more additional therapies for treating hemoglobinopathies may include, for example, blood transfusion and/or iorn chealation (e.g., removal) therapy. Known iron chealation agents include, for example, deferoxamine and deferasirox.

[0606] The one or more additional therapies for treating hemoglobinopathies may include, for example, folic acid supplements, or hydroxyurea (e.g., 5-hydroxyurea). The one or more additional therapies for treating hemoglobinopathies may be hydroxyurea. In embodiments, the hydroxyurea may be administered at a dose of, for example, 10-35 mg/kg per day, e.g., 10-20 mg/kg per day. In embodiments, the hydroxyurea is adminstered at a dose of 10 mg/kg per day. In embodiments, the hydroxyurea is adminstered at a dose of 10 mg/kg per day. In embodiments, the hydroxyurea is adminstered at a dose of 20 mg/kg per day. In embodiments, the hydroxyurea is administered before and/or after the cell (or population of cells), e.g., CD34+ cell (or population of cells) of the invention, e.g., as described herein.

[0607] The one or more additional therapeutic agents may include, for example, an anti-p-selectin antibody, e.g., Se1G1 (Selexys). P-selectin antibodies are described in, for example, PCT publication WO1993/021956, PCT publication WO1995/034324, PCT publication WO2005/100402, PCT publication WO2008/069999, U.S. Pat. Applicatation Publication US2011/0293617, U.S. Pat. No. 5800815, U.S. Pat. No. 6667036, U.S. Pat. No. 8945565, U.S. Pat. No. 8377440 and U.S. Pat. No. 9068001, the contents of each of which are incorporated herein in their entirety.

[0608] The one or more additional agents may include, for example, a small molecule which upregulates fetal hemoglobin. Examples of such molecules include TN1 (e.g., as described in Nam, T. et al., ChemMedChem 2011, 6, 777 - 780, DOI: 10.1002/cmdc.201000505, herein incorporated by reference).

[0609] The one or more additional therapies may also include irradiation or other bone marrow ablation therapies known in the art. An example of such a therapy is busulfan. Such additional therapy may be performed prior to introduction of the cells of the invention into the subject. In an embodiment the methods of treatment described herein (e.g., the methods of treatment that include administration of cells (e.g., HSPCs) modified by the methods described herein (e.g., modified with a CRISPR system described herein, e.g., to increase HbF production)), the method does not include the step of bone marrow ablation. In embodiments, the methods include a partial bone marrow ablation step.

[0610] The therapies described herein (e.g., comprising administering a population of HSPCs, e.g., HSPCs modified using a CRISPR system described herein) may also be combined with an additional therapeutic agent. In an embodiment, the additional therapeutic agent is an HDAC inhibitor, e.g., panobinostat. In an embodiment, the additional therapeutic is a compound described in PCT Publication No. WO2014/150256, e.g., a compound described in Table 1 of WO2014/150256, e.g., GBT440. Other examples of HDAC inhibitors include, for example, suberoylanilide hydroxamic acid (SAHA). The one or more additional agents may include, for example, a DNA methylation inhibitor. Such agents have been shown to increase the HbF induction in cells having reduced BCL11a activity (e.g., Jian Xu et al, Science 334, 993 (2011); DOI: 0.1126/science. 1211053, herein incorporated by reference). Other HDAC inhibitors include any HDAC inhibitor known in the art, for example, trichostatin A, HC toxin, DACI-2, FK228, DACI-14, depudicin, DACI-16, tubacin, NK57, MAZ1536, NK125, Scriptaid, Pyroxamide, MS-275, ITF-2357, MCG-D0103, CRA-024781, CI-994, and LBH589 (see, e.g., Bradner JE, et al., PNAS, 2010 (vol. 107:28), 12617-12622, herein incorporated by reference in its entirety).

[0611] The gRNA molecules described herein, or cells (e.g., hematopoietic stem cells, e.g., CD34+ cells) modified with the gRNA molecules described herein, and the co-therapeutic agent or co-therapy can be administered in the same formulation or separately. In the case of separate administration, the gRNA molecules described herein, or cells modified with the gRNA molecules described herein, can be administered before, after or concurrently with the co-therapeutic or co-therapy. One agent may precede or follow administration of the other agent by intervals ranging from minutes to weeks. In embodiments where two or more different kinds of therapeutic agents are applied separately to a subject, one would generally ensure that a significant period of time did not expire between the time of each delivery, such that these different kinds of agents would still be able to exert an advantageously combined effect on the target tissues or cells.

### XIII. Modified Nucleosides, Nucleotides, and Nucleic Acids

[0612] Modified nucleosides and modified nucleotides can be present in nucleic acids, e.g., particularly gRNA, but also other forms of RNA, e.g., mRNA, RNAi, or siRNA. As described herein “nucleoside” is defined as a compound containing a five-carbon sugar molecule (a pentose or ribose) or derivative thereof, and an organic base, purine or pyrimidine, or a derivative thereof. As described herein, “nucleotide” is defined as a nucleoside further comprising a phosphate group.

[0613] Modified nucleosides and nucleotides can include one or more of:
[0614] (i) alteration, e.g., replacement, of one or both of the non-linking phosphate oxygens and/or of one or more of the linking phosphate oxygens in the phosphodiester backbone linkage;
[0615] (ii) alteration, e.g., replacement, of a constituent of the ribose sugar, e.g., of the 2′ hydroxyl on the ribose sugar;
[0616] (iii) wholesale replacement of the phosphate moiety with “dephospho” linkers;
[0617] (iv) modification or replacement of a naturally occurring nucleobase, including with a non-canonical nucleobase;
[0618] (v) replacement or modification of the ribose-phosphate backbone;
[0619] (vi) modification of the 3′ end or 5′ end of the oligonucleotide, e.g., removal, modification or replacement of a terminal phosphate group or conjugation of a moiety, cap or linker; and (vii) modification or replacement of the sugar.

[0620] The modifications listed above can be combined to provide modified nucleosides and nucleotides that can have two, three, four, or more modifications. For example, a modified nucleoside or nucleotide can have a modified sugar and a modified nucleobase. In an embodiment, every base of a gRNA is modified, e.g., all bases have a modified phosphate group, e.g., all are phosphorothioate groups. In an embodiment, all, or substantially all, of the phosphate groups of a unimolecular or modular gRNA molecule are replaced with phosphorothioate groups. In embodiments, one or more of the five 3′-terminal bases and/or one or more of the fige 5′-terminal bases of the gRNA are modified with a phosphorothioate group.

[0621] In an embodiment, modified nucleotides, e.g., nucleotides having modifications as described herein, can be incorporated into a nucleic acid, e.g., a “modified nucleic acid.” In some embodiments, the modified nucleic acids comprise one, two, three or more modified nucleotides. In some embodiments, at least 5% (e.g., at least about 5%, at least about 10%, at least about 15%, at least about 20%, at least about 25%, at least about 30%, at least about 35%, at least about 40%, at least about 45%, at least about 50%, at least about 55%, at least about 60%, at least about 65%, at least about 70%, at least about 75%, at least about 80%, at least about 85%, at least about 90%, at least about 95%, or about 100%) of the positions in a modified nucleic acid are a modified nucleotides.

[0622] Unmodified nucleic acids can be prone to degradation by, e.g., cellular nucleases. For example, nucleases can hydrolyze nucleic acid phosphodiester bonds. Accordingly, in one aspect the modified nucleic acids described herein can contain one or more modified nucleosides or nucleotides, e.g., to introduce stability toward nucleases.

[0623] In some embodiments, the modified nucleosides, modified nucleotides, and modified nucleic acids described herein can exhibit a reduced innate immune response when introduced into a population of cells, both in vivo and ex vivo. The term “innate immune response” includes a cellular response to exogenous nucleic acids, including single stranded nucleic acids, generally of viral or bacterial origin, which involves the induction of cytokine expression and release, particularly the interferons, and cell death. In some embodiments, the modified nucleosides, modified nucleotides, and modified nucleic acids described herein can disrupt binding of a major groove interacting partner with the nucleic acid. In some embodiments, the modified nucleosides, modified nucleotides, and modified nucleic acids described herein can exhibit a reduced innate immune response when introduced into a population of cells, both in vivo and ex vivo, and also disrupt binding of a major groove interacting partner with the nucleic acid.

### Definitions of Chemical Groups

[0624] As used herein, “alkyl” is meant to refer to a saturated hydrocarbon group which is straight-chained or branched. Example alkyl groups include methyl (Me), ethyl (Et), propyl (e.g., n-propyl and isopropyl), butyl (e.g., n-butyl, isobutyl, t-butyl), pentyl (e.g., n-pentyl, isopentyl, neopentyl), and the like. An alkyl group can contain from 1 to about 20, from 2 to about 20, from 1 to about 12, from 1 to about 8, from 1 to about 6, from 1 to about 4, or from 1 to about 3 carbon atoms.

[0625] As used herein, “aryl” refers to monocyclic or polycyclic (e.g., having 2, 3 or 4 fused rings) aromatic hydrocarbons such as, for example, phenyl, naphthyl, anthracenyl, phenanthrenyl, indanyl, indenyl, and the like. In some embodiments, aryl groups have from 6 to about 20 carbon atoms.

[0626] As used herein, “alkenyl” refers to an aliphatic group containing at least one double bond. As used herein, “alkynyl” refers to a straight or branched hydrocarbon chain containing 2- 12 carbon atoms and characterized in having one or more triple bonds. Examples of alkynyl groups include, but are not limited to, ethynyl, propargyl, and 3-hexynyl.

[0627] As used herein, “arylalkyl” or “aralkyl” refers to an alkyl moiety in which an alkyl hydrogen atom is replaced by an aryl group. Aralkyl includes groups in which more than one hydrogen atom has been replaced by an aryl group. Examples of “arylalkyl” or “aralkyl” include benzyl, 2-phenylethyl, 3-phenylpropyl, 9-fluorenyl, benzhydryl, and trityl groups.

[0628] As used herein, “cycloalkyl” refers to a cyclic, bicyclic, tricyclic, or polycyclic non- aromatic hydrocarbon groups having 3 to 12 carbons. Examples of cycloalkyl moieties include, but are not limited to, cyclopropyl, cyclopentyl, and cyclohexyl.

[0629] As used herein, “heterocyclyl” refers to a monovalent radical of a heterocyclic ring system. Representative heterocyclyls include, without limitation, tetrahydrofuranyl, tetrahydrothienyl, pyrrolidinyl, pyrrolidonyl, piperidinyl, pyrrolinyl, piperazinyl, dioxanyl, dioxolanyl, diazepinyl, oxazepinyl, thiazepinyl, and morpholinyl.

[0630] As used herein, “heteroaryl” refers to a monovalent radical of a heteroaromatic ring system. Examples of heteroaryl moieties include, but are not limited to, imidazolyl, oxazolyl, thiazolyl, triazolyl, pyrrolyl, furanyl, indolyl, thiophenyl pyrazolyl, pyridinyl, pyrazinyl, pyridazinyl, pyrimidinyl, indolizinyl, purinyl, naphthyridinyl, quinolyl, and pteridinyl.

### Definitions of Chemical Groups in Compounds of Formula (I)

[0631] In general, for groups comprising two or more subgroups, the last named group is the radical attachment point, for example, “alkylaryl” means a monovalent radical of the formula alkyl-aryl-, while “arylalkyl” means a monovalent radical of the formula aryl-alkyl-.

[0632] In embodiments of Formula (I) whereby R^{3c} or R⁴ are arylalkyl-O-, this means a monovalent O radical of the formula aryl-alkyl-O- or -O-alkyl-aryl.

[0633] Furthermore, the use of a term designating a monovalent radical where a divalent radical is appropriate shall be construed to designate the respective divalent radical and vice versa. Unless otherwise specified, conventional definitions of terms control and conventional stable atom valences are presumed and achieved in all formulas and groups.

[0634] The term “substituted” means that the specified group or moiety bears one or more suitable substituents wherein the substituents may connect to the specified group or moiety at one or more positions. For example, an aryl substituted with a cycloalkyl may indicate that the cycloalkyl connects to one atom of the aryl with a bond or by fusing with the aryl and sharing two or more common atoms.

[0635] Thus, the term “C₁-C₁₀alkyl” in compounds of Formula (I) refers to a hydrocarbon chain radical consisting solely of carbon and hydrogen atoms, containing no unsaturation, having from one to ten carbon atoms, and which is attached to the rest of the molecule by a single bond. The terms “C₁-C₃alkyl”, “C₁-C₄alkyl”, “C₁-C₆alkyl”, “C₁-C₈alkyl” are to be construed accordingly.

[0636] As used herein, the term “C₁-Cₛalkoxyl” refers to a radical of the formula —ORₐ where Ra is a C₁₋C₆alkyl radical as generally defined above.

[0637] “Alkynyl” means a straight or branched chain unsaturated hydrocarbon containing 2-12 carbon atoms. The “alkynyl” group contains at least one triple bond in the chain. The term “C₂-C₄alkynyl” is to be construed accordingly. Examples of alkynyl groups include ethynyl, propargyl, n-butynyl, isobutynyl, pentynyl, or hexynyl. An alkynyl group can be unsubstituted or substituted.

[0638] Preferred examples of “C₂-C₄alkynyl” include, without limitations, ethynyl, prop-1-ynyl, prop-2-ynyl and but-2-ynyl.

[0639] As used herein, the term “C₁-C₆haloalkyl” refers to C₁-C₆alkyl radical, as defined above, substituted by one or more halo radicals, as defined herein. Examples of C₁-C₆haloalkyl include, but are not limited to, trifluoromethyl, difluoromethyl, fluoromethyl, trichloromethyl, 1,1-difluoroethyl, 2,2-difluoroethyl, 2,2,2-trifluoroethyl, 2-fluoropropyl, 3,3-difluoropropyl and 1-fluoromethyl-2-fluoroethyl, 1,3-dibromopropan-2-yl, 3-bromo-2-fluoropropyl and 1,4,4-trifluorobutan-2-yl.

[0640] As used herein, the term “C₁-C₆haloalkoxyl” means a C₁-C₆alkoxyl group as defined herein substituted with one or more halo radicals. Examples of C₁-C₆haloalkoxyl groups include, but are not limited to, trifluoromethoxy, difluoromethoxy, fluoromethoxy, trichloromethoxy, 1,1-difluoroethoxy, 2,2-difluoroethoxy, 2,2,2-trifluoroethoxy, 1-fluoromethyl-2-fluoroethoxy, pentafluoroethoxy, 2-fluoropropoxy, 3,3-difluoropropoxy and 3-dibromopropoxy. For example, the one or more halo radicals of C₁-C₆haloalkoxyl is fluoro. For example, C₁-C₆haloalkoxyl is selected from trifluoromethoxy, difluoromethoxy, fluoromethoxy, 1,1-difluoroethoxy, 2,2-difluoroethoxy, 2,2,2-trifluoroethoxy, 1-fluoromethyl-2-fluoroethoxy, and pentafluoroethoxy.

[0641] The term “halogen” or “halo” means fluorine, chlorine, bromine or iodine.

[0642] As used herein, the term “cycloalkyl” means a monocyclic or polycyclic saturated or partially unsaturated carbon ring containing 3-18 carbon atoms wherein there are no delocalized pi electrons (aromaticity) shared among the ring carbon. The terms “C3-C₈cycloalkyl” and “C₃-C₆cycloalkyl” are to be construed accordingly. The term polycyclic encompasses bridged (e.g., norbomane), fused (e.g., decalin) and spirocyclic cycloalkyl. For example, cycloalkyl, e.g., C₃-C₈cycloalkyl, is a monocyclic or bridged hydrocarbon group of 3 to 8 carbon atoms.

[0643] Examples of C₃-C₈cycloalkyl include, but are not limited to, cyclopropyl, cyclobutyl, cyclopentyl, cyclohexyl, bicyclo[1.1.1]pentyl, bicyclo[2.1.1]hexyl, bicyclo[2.1.1]heptyl, and bicyclo[2.2.2]octyl.

[0644] The term “aryl” means monocyclic, bicyclic or polycyclic carbocyclic aromatic rings. Examples of aryl include, but are not limited to, phenyl, naphthyl (e.g., naphth-1-yl, naphth-2-yl), anthryl (e.g., anthr-1-yl, anthr-9-yl), phenanthryl (e.g., phenanthr-1-yl, phenanthr-9-yl), and the like. Aryl is also intended to include monocyclic, bicyclic or polycyclic carbocyclic aromatic rings substituted with carbocyclic aromatic rings. Representative examples are biphenyl (e.g., biphenyl-2-yl, biphenyl-3-yl, biphenyl-4-yl), phenylnaphthyl (e.g., 1-phenylnaphth-2-yl, 2-phenylnaphth-1-yl), and the like. Aryl is also intended to include partially saturated bicyclic or polycyclic carbocyclic rings with at least one unsaturated moiety (e.g., a benzo moiety). Representative examples are, indanyl (e.g., indan-1-yl, indan-5-yl), indenyl (e.g., inden-1-yl, inden-5-yl), 1,2,3,4-tetrahydronaphthyl (e.g., 1,2,3,4-tetrahydronaphth-1-yl, 1,2,3,4-tetrahydronaphth-2-yl, 1,2,3,4-tetrahydronaphth-6-yl), 1,2-dihydronaphthyl (e.g., 1,2-dihydronaphth-1-yl, 1,2-dihydronaphth-4-yl, 1,2-dihydronaphth-6-yl), fluorenyl (e.g., fluoren-1-yl, fluoren-4-yl, fluoren-9-yl), and the like. Aryl is also intended to include partially saturated bicyclic or polycyclic carbocyclic aromatic rings containing one or two bridges. Representative examples are, benzonorbornyl (e.g., benzonorborn-3-yl, benzonorborn-6-yl), 1,4-ethano-1,2,3,4-tetrahydronapthyl (e.g., 1,4-ethano-1,2,3,4-tetrahydronapth-2-yl, 1,4-ethano-1,2,3,4-tetrahydronapth-10-yl), and the like. The term “C₆-C₁₀aryl” is to be construed accordingly.

[0645] Examples of aryl (e.g., C₆-C₁₀aryl) in compounds of Formula (I) include, but are not limited to, indenyl, (e.g., inden-1-yl, inden-5-yl) phenyl (C₆H₅), naphthyl (C₁₀H₇) (e.g., naphth-1-yl, naphth-2-yl), indanyl (e.g., indan-1-yl, indan-5-yl), and tetrahydronaphthalenyl (e.g., 1,2,3,4-tetrahydronaphthalenyl).

[0646] As used herein, the term “C₆-C₁₀arylC₁-C₆alkyl” refers to a monovalent radical of the formula -Rₐ-C₆-C₁₀aryl where Rₐ is a C₁-C₆alkyl radical as generally defined above. Examples ofC₆-C₁₀arylC₁-C₆alkyl include, but are not limited to, C₁alkyl-C₆H₅ (benzyl), C₁alkyl-C₁₀H₇, -CH(CH₃)-C₆H₅, -C(CH₃)₂-C₆H₅, and -(CH₂)₂-₆-C₆H₅.

[0647] The term “Heterocyclyl” means a saturated or partially saturated monocyclic or polycyclic ring containing carbon and at least one heteroatom selected from oxygen, nitrogen, and sulfur (O, N, and S) and wherein there are no delocalized pi electrons (aromaticity) shared among the ring carbon or heteroatoms. The terms “4- to 6-membered heterocyclyl” and “4- to 11-membered heterocyclyl” are to be construed accordingly. The heterocyclyl ring structure may be substituted by one or more substituents. The substituents can themselves be optionally substituted. The heterocyclyl may be bonded via a carbon atom or heteroatom. The term polycyclic encompasses bridged, fused and spirocyclic heterocyclyl.

[0648] Examples of heterocyclyl rings include, but are not limited to, oxetanyl, azetidinyl, tetrahydrofuranyl, tetrahydropyranyl, pyrrolidinyl, oxazolinyl, isoxazolinyl, oxazolidinyl, thiazolidinyl, pyranyl, thiopyranyl, tetrahydropyranyl, dioxalinyl, piperidinyl, morpholinyl, thiomorpholinyl, thiomorpholinyl S-oxide, thiomorpholinyl S-dioxide, piperazinyl, azepinyl, oxepinyl, diazepinyl, tropanyl, oxazolidinonyl, 1,4-dioxanyl, dihydrofuranyl, 1,3-dioxolanyl, imidazolidinyl, dihydroisoxazolinyl, pyrrolinyl, pyrazolinyl, oxazepinyl, dithiolanyl, homotropanyl, dihydropyranyl (e.g., 3,6-dihydro-2H-pyranyl), oxaspiroheptanyl (e.g., 2-oxaspiro[3.3]heptan-6-yl) and the like.

[0649] As used herein, the term “heteroaryl” as used herein is intended to include monocyclic heterocyclic aromatic rings containing one or more heteroatoms selected from oxygen, nitrogen, and sulfur (O, N, and S). Representative examples are pyrrolyl, furanyl, thienyl, oxazolyl, thiazolyl, imidazolyl, pyrazolyl, isothiazolyl, isooxazolyl, triazolyl, (e.g., 1,2,4-triazolyl), oxadiazolyl, (e.g., 1,2,3-oxadiazolyl, 1,2,4-oxadiazolyl, 1,2,5-oxadiazolyl, 1,3,4-oxadiazolyl), thiadiazolyl (e.g., 1,2,3-thiadiazolyl, 1,2,4-thiadiazolyl, 1,2,5-thiadiazolyl, 1,3,4-thiadiazolyl), tetrazolyl, pyranyl, pyridinyl, pyridazinyl, pyrimidinyl, pyrazinyl, 1,2,3-triazinyl, 1,2,4-triazinyl, 1,3,5-triazinyl, thiadiazinyl, azepinyl, azecinyl, and the like.

[0650] Heteroaryl is also intended to include bicyclic heterocyclic aromatic rings containing one or more heteroatoms selected from oxygen, nitrogen, and sulfur (O, N, and S). Representative examples are indolyl, isoindolyl, benzofuranyl, benzothiophenyl, indazolyl, benzopyranyl, benzimidazolyl, benzothiazolyl, benzisothiazolyl, benzoxazolyl, benzisoxazolyl, benzoxazinyl, benzotriazolyl, naphthyridinyl, phthalazinyl, pteridinyl, purinyl, quinazolinyl, cinnolinyl, quinolinyl, isoquinolinyl, quinoxalinyl, oxazolopyridinyl, isooxazolopyridinyl, pyrrolopyridinyl, furopyridinyl, thienopyridinyl, imidazopyridinyl, imidazopyrimidinyl, pyrazolopyridinyl, pyrazolopyrimidinyl, pyrazolotriazinyl, thiazolopyridinyl, thiazolopyrimidinyl, imdazothiazolyl, triazolopyridinyl, triazolopyrimidinyl, and the like.

[0651] Heteroaryl is also intended to include polycyclic heterocyclic aromatic rings containing one or more heteroatoms selected from oxygen, nitrogen, and sulfur (O, N, and S). Representative examples are carbazolyl, phenoxazinyl, phenazinyl, acridinyl, phenothiazinyl, carbolinyl, phenanthrolinyl, and the like.

[0652] Heteroaryl is also intended to include partially saturated monocyclic, bicyclic or polycyclic heterocyclyls containing one or more heteroatoms selected oxygen, nitrogen, and sulfur (O, N, and S). Representative examples are imidazolinyl, indolinyl, dihydrobenzofuranyl, dihydrobenzothienyl, dihydrobenzopyranyl, dihydropyridooxazinyl, dihydrobenzodioxinyl (e.g., 2,3-dihydrobenzo[b][1,4]dioxinyl), benzodioxolyl (e.g., benzo[d][1,3]dioxole), dihydrobenzooxazinyl (e.g., 3,4-dihydro-2H-benzo[b][1,4]oxazine), tetrahydroindazolyl, tetrahydrobenzimidazolyl, tetrahydroimidazo[4,5-c]pyridyl, tetrahydroquinolinyl, tetrahydroisoquinolinyl, tetrahydroquinoxalinyl, and the like.

[0653] The heteroaryl ring structure may be substituted by one or more substituents. The substituents can themselves be optionally substituted. The heteroaryl ring may be bonded via a carbon atom or heteroatom.

[0654] The term “5-10 membered heteroaryl” is to be construed accordingly.

[0655] Examples of 5-10 membered heteroaryl include, but are not limited to, indolyl, imidazopyridyl, isoquinolinyl, benzooxazolonyl, pyridinyl, pyrimidinyl, pyridinonyl, benzotriazolyl, pyridazinyl, pyrazolotriazinyl, indazolyl, benzimidazolyl, quinolinyl, triazolyl, (e.g., 1,2,4-triazolyl), pyrazolyl, thiazolyl, oxazolyl, isooxazolyl, pyrrolyl, oxadiazolyl, (e.g., 1,2,3-oxadiazolyl, 1,2,4-oxadiazolyl, 1,2,5-oxadiazolyl, 1,3,4-oxadiazolyl), imidazolyl, pyrrolopyridinyl, tetrahydroindazolyl, quinoxalinyl, thiadiazolyl (e.g., 1,2,3-thiadiazolyl, 1,2,4-thiadiazolyl, 1,2,5-thiadiazolyl, 1,3,4-thiadiazolyl), pyrazinyl, oxazolopyridinyl, pyrazolopyrimidinyl, benzoxazolyl, indolinyl, isooxazolopyridinyl, dihydropyridooxazinyl, tetrazolyl, dihydrobenzodioxinyl (e.g., 2,3-dihydrobenzo[b][1,4]dioxinyl), benzodioxolyl (e.g., benzo[d][1,3]dioxole) and dihydrobenzooxazinyl (e.g., 3,4-dihydro-2H-benzo[b] [1,4]oxazine).

[0656] As used herein, the term “oxo” refers to the radical =O.

[0657] As used herein, the term “di(C₁-C₆alkyl)aminoC₁-C₆alkyl” refers to a radical of the formula —Rₐ₁—N(Rₐ₂)—Rₐ₂ where Rₐ₁ is a C₁-C₆alkyl radical as defined above and each Rₐ₂ is a C₁-C₆alkyl radical, which may be the same or different, as defined above. The nitrogen atom may be bonded to any carbon atom in any alkyl radical. Examples include, but are not limited to, (C₁alkyl-NR^{6a}R^{6b}), (C₁alkyl-CH₂-NR^{6a}R^{6b}), (—(CH₂)₃—NR^{6a}R^{6b}), (—(CH₂)₄—NR^{6a}R^{6b}), (—(CH₂)₅—NR^{6a}R^{6b}), and (—(CH₂)₆—NR^{6a}R^{6b}), wherein R^{6a} and R^{6b} are as defined herein.

[0658] As used herein, the term “di(C₁-C₆alkyl)amino” refers to an amino radical of formula —N(Rₐ₁)—Rₐ₁, where each Rₐ₁ is a C₁-C₆alkyl radical, which may be the same or different, as defined above.

[0659] “Cyano” or “—CN” means a substituent having a carbon atom joined to a nitrogen atom by a triple bond, e.g., C≡N.

[0660] As used herein, the term “optionally substituted” includes unsubstituted or substituted.

[0661] As used herein, “

[chemical structure]

” denotes the point of attachment to the other part of the molecule.

[0662] As used herein, the term nitrogen protecting group (PG) in a compound of the disclosure or any intermediates in any of the general schemes 1 to 4 and subformulae thereof refers to a group that should protect the functional groups concerned against unwanted secondary reactions, such as acylations, etherifications, esterifications, oxidations, solvolysis and similar reactions. It may be removed under deprotection conditions. Depending on the protecting group employed, the skilled person would know how to remove the protecting group to obtain the free amine NH₂ group by reference to known procedures. These include reference to organic chemistry textbooks and literature procedures such as J. F. W. McOmie, “Protective Groups in Organic Chemistry”, Plenum Press, London and New York 1973; T. W. Greene and P. G. M. Wuts, “Greene’s Protective Groups in Organic Synthesis”, Fourth Edition, Wiley, New York 2007; in “The Peptides”; Volume 3 (editors: E. Gross and J. Meienhofer), Academic Press, London and New York 1981; P. J. Kocienski, “Protecting Groups”, Third Edition, Georg Thieme Verlag, Stuttgart and New York 2005; and in “Methoden der organischen Chemie” (Methods of Organic Chemistry), Houben Weyl, 4th edition, Volume 15/I, Georg Thieme Verlag, Stuttgart 1974.

[0663] Preferred nitrogen protecting groups generally comprise: C₁-C₆alkyl (e.g., tert-butyl), e.g., C₁-C₄alkyl, C₁-C₂alkyl, or C₁alkyl which is mono-, di- or tri-substituted by trialkylsilyl-C₁-C₇alkoxy (e.g., trimethylsilyethoxy), aryl, e.g., phenyl, or a heterocyclic group (e.g., benzyl, cumyl, benzhydryl, pyrrolidinyl, trityl, pyrrolidinylmethyl, 1-methyl-1,1-dimethylbenzyl, (phenyl)methylbenzene) wherein the aryl ring or the heterocyclic group is unsubstituted or substituted by one or more, e.g., two or three, residues, e.g., selected from the group consisting of C₁-C₇alkyl, hydroxy, C₁-C₇alkoxy (e.g., para-methoxy benzyl (PMB)), C₂-C₈-alkanoyl-oxy, halogen, nitro, cyano, and CF₃, aryl-C₁-C₂-alkoxycarbonyl (e.g., phenyl-C₁-C₂-alkoxycarbonyl (e.g., benzyloxycarbonyl (Cbz), benzyloxymethyl (BOM), pivaloyloxymethyl (POM)), C₁-C₁₀-alkenyloxycarbonyl, C₁-C₆alkylcarbonyl (e.g., acetyl or pivaloyl), C₆-C₁₀-arylcarbonyl; C₁-C₆-alkoxycarbonyl (e.g., tertbutoxycarbonyl (Boc), methylcarbonyl, trichloroethoxycarbonyl (Troc), pivaloyl (Piv), allyloxycarbonyl), C₆-C₁₀-arylC₁-C₆-alkoxycarbonyl (e.g., 9-fluorenylmethyloxycarbonyl (Fmoc)), allyl or cinnamyl, sulfonyl or sulfenyl, succinimidyl group, silyl groups (e.g., triarylsilyl, trialkylsilyl, triethylsilyl (TES), trimethylsilylethoxymethyl (SEM), trimethylsilyl (TMS), triisopropylsilyl or tertbutyldimethylsilyl).

[0664] According to the disclosure, the preferred protecting group (PG) can be selected from the group comprising tert-butyloxycarbonyl (Boc), benzyloxycarbonyl (Cbz), para-methoxy benzyl (PMB), methyloxycarbonyl, trimethylsilylethoxymethyl (SEM) and benzyl. In an embodiment, the protecting group (PG) is tert-butyloxycarbonyl (Boc).

[0665] In some embodiments, the compounds of the disclosure are selective over other proteins.

### Phosphate Backbone Modifications

### The Phosphate Group

[0666] In some embodiments, the phosphate group of a modified nucleotide can be modified by replacing one or more of the oxygens with a different substituent. Further, the modified nucleotide, e.g., modified nucleotide present in a modified nucleic acid, can include the wholesale replacement of an unmodified phosphate moiety with a modified phosphate as described herein. In some embodiments, the modification of the phosphate backbone can include alterations that result in either an uncharged linker or a charged linker with unsymmetrical charge distribution.

[0667] Examples of modified phosphate groups include, phosphorothioate, phosphoroselenates, borano phosphates, borano phosphate esters, hydrogen phosphonates, phosphoroamidates, alkyl or aryl phosphonates and phosphotriesters. In some embodiments, one of the non-bridging phosphate oxygen atoms in the phosphate backbone moiety can be replaced by any of the following groups: sulfur (S), selenium (Se), BR₃ (wherein R can be, e.g., hydrogen, alkyl, or aryl), C (e.g., an alkyl group, an aryl group, and the like), H, NR₂ (wherein R can be, e.g., hydrogen, alkyl, or aryl), or OR (wherein R can be, e.g., alkyl or aryl). The phosphorous atom in an unmodified phosphate group is achiral. However, replacement of one of the non-bridging oxygens with one of the above atoms or groups of atoms can render the phosphorous atom chiral; that is to say that a phosphorous atom in a phosphate group modified in this way is a stereogenic center. The stereogenic phosphorous atom can possess either the “R” configuration (herein Rp) or the “S” configuration (herein Sp).

[0668] Phosphorodithioates have both non-bridging oxygens replaced by sulfur. The phosphorus center in the phosphorodithioates is achiral which precludes the formation of oligoribonucleotide diastereomers. In some embodiments, modifications to one or both non-bridging oxygens can also include the replacement of the non-bridging oxygens with a group independently selected from S, Se, B, C, H, N, and OR (R can be, e.g., alkyl or aryl).

[0669] The phosphate linker can also be modified by replacement of a bridging oxygen, (i.e., the oxygen that links the phosphate to the nucleoside), with nitrogen (bridged phosphoroamidates), sulfur (bridged phosphorothioates) and carbon (bridged methylenephosphonates). The replacement can occur at either linking oxygen or at both of the linking oxygens.

### Replacement of the Phosphate Group

[0670] The phosphate group can be replaced by non-phosphorus containing connectors. In some embodiments, the charge phosphate group can be replaced by a neutral moiety.

[0671] Examples of moieties which can replace the phosphate group can include, without limitation, e.g., methyl phosphonate, hydroxylamino, siloxane, carbonate, carboxymethyl, carbamate, amide, thioether, ethylene oxide linker, sulfonate, sulfonamide, thioformacetal, formacetal, oxime, methyleneimino, methylenemethylimino, methylenehydrazo, methylenedimethylhydrazo and methyleneoxymethylimino.

### Replacement of the Ribophosphate Backbone

[0672] Scaffolds that can mimic nucleic acids can also be constructed wherein the phosphate linker and ribose sugar are replaced by nuclease resistant nucleoside or nucleotide surrogates. In some embodiments, the nucleobases can be tethered by a surrogate backbone. Examples can include, without limitation, the morpholino, cyclobutyl, pyrrolidine and peptide nucleic acid (PNA) nucleoside surrogates.

### Sugar Modifications

[0673] The modified nucleosides and modified nucleotides can include one or more modifications to the sugar group. For example, the 2′ hydroxyl group (OH) can be modified or replaced with a number of different “oxy” or “deoxy” substituents. In some embodiments, modifications to the 2 hydroxyl group can enhance the stability of the nucleic acid since the hydroxyl can no longer be deprotonated to form a 2-alkoxide ion. The 2′-alkoxide can catalyze degradation by intramolecular nucleophilic attack on the linker phosphorus atom.

[0674] Examples of “oxy”-2′ hydroxyl group modifications can include alkoxy or aryloxy (OR, wherein “R” can be, e.g., alkyl, cycloalkyl, aryl, aralkyl, heteroaryl or a sugar); polyethyleneglycols (PEG), 0(CH₂CH₂0)ₙCH2CH₂OR wherein R can be, e.g., H or optionally substituted alkyl, and n can be an integer from 0 to 20 (e.g., from 0 to 4, from 0 to 8, from 0 to 10, from 0 to 16, from 1 to 4, from 1 to 8, from 1 to 10, from 1 to 16, from 1 to 20, from 2 to 4, from 2 to 8, from 2 to 10, from 2 to 16, from 2 to 20, from 4 to 8, from 4 to 10, from 4 to 16, and from 4 to 20). In some embodiments, the “oxy”-2′ hydroxyl group modification can include “locked” nucleic acids (LNA) in which the 2′ hydroxyl can be connected, e.g., by a Ci-₆ alkylene or Cj-6 heteroalkylene bridge, to the 4′ carbon of the same ribose sugar, where exemplary bridges can include methylene, propylene, ether, or amino bridges; O-amino (wherein amino can be, e.g., NH₂; alkylamino, dialkylamino, heterocyclyl, arylamino, diarylamino, heteroarylamino, or diheteroarylamino, ethylenediamine, or polyamino) and aminoalkoxy, 0(CH₂)ₙ-amino, (wherein amino can be, e.g., NH₂; alkylamino, dialkylamino, heterocyclyl, arylamino, diarylamino, heteroarylamino, or diheteroarylamino, ethylenediamine, or polyamino). In some embodiments, the “oxy”-2′ hydroxyl group modification can include the methoxyethyl group (MOE), (OCH₂CH₂OCH₃, e.g., a PEG derivative).

[0675] “Deoxy” modifications can include hydrogen (i.e. deoxyribose sugars, e.g., at the overhang portions of partially ds RNA); halo (e.g., bromo, chloro, fluoro, or iodo); amino (wherein amino can be, e.g., NH₂; alkylamino, dialkylamino, heterocyclyl, arylamino, diarylamino, heteroarylamino, diheteroarylamino, or amino acid); NH(CH₂CH₂NH)ₙCH2CH₂- amino (wherein amino can be, e.g., as described herein), -NHC(0)R (wherein R can be, e.g., alkyl, cycloalkyl, aryl, aralkyl, heteroaryl or sugar), cyano; mercapto; alkyl-thio-alkyl; thioalkoxy; and alkyl, cycloalkyl, aryl, alkenyl and alkynyl, which may be optionally substituted with e.g., an amino as described herein.

[0676] The sugar group can also contain one or more carbons that possess the opposite stereochemical configuration than that of the corresponding carbon in ribose. Thus, a modified nucleic acid can include nucleotides containing e.g., arabinose, as the sugar. The nucleotide “monomer” can have an alpha linkage at the Γ position on the sugar, e.g., alpha-nucleosides. The modified nucleic acids can also include “abasic” sugars, which lack a nucleobase at C- . These abasic sugars can also be further modified at one or more of the constituent sugar atoms. The modified nucleic acids can also include one or more sugars that are in the L form, e.g. L- nucleosides.

[0677] Generally, RNA includes the sugar group ribose, which is a 5-membered ring having an oxygen. Exemplary modified nucleosides and modified nucleotides can include, without limitation, replacement of the oxygen in ribose (e.g., with sulfur (S), selenium (Se), or alkylene, such as, e.g., methylene or ethylene); addition of a double bond (e.g., to replace ribose with cyclopentenyl or cyclohexenyl); ring contraction of ribose (e.g., to form a 4-membered ring of cyclobutane or oxetane); ring expansion of ribose (e.g., to form a 6- or 7-membered ring having an additional carbon or heteroatom, such as for example, anhydrohexitol, altritol, mannitol, cyclohexanyl, cyclohexenyl, and morpholino that also has a phosphoramidate backbone). In some embodiments, the modified nucleotides can include multicyclic forms (e.g., tricyclo; and “unlocked” forms, such as glycol nucleic acid (GNA) (e.g., R-GNA or S-GNA, where ribose is replaced by glycol units attached to phosphodiester bonds), threose nucleic acid (TNA, where ribose is replaced with a-L-threofuranosyl-(3′-→2′)).

### Modifications on the Nucleobase

[0678] The modified nucleosides and modified nucleotides described herein, which can be incorporated into a modified nucleic acid, can include a modified nucleobase. Examples of nucleobases include, but are not limited to, adenine (A), guanine (G), cytosine (C), and uracil (U). These nucleobases can be modified or wholly replaced to provide modified nucleosides and modified nucleotides that can be incorporated into modified nucleic acids. The nucleobase of the nucleotide can be independently selected from a purine, a pyrimidine, a purine or pyrimidine analog. In some embodiments, the nucleobase can include, for example, naturally-occurring and synthetic derivatives of a base.

### Uracil

[0679] In some embodiments, the modified nucleobase is a modified uracil. Exemplary nucleobases and nucleosides having a modified uracil include without limitation pseudouridine (ψ), pyridin-4-one ribonucleoside, 5-aza-uridine, 6-aza-uridine, 2-thio-5-aza-uridine, 2-thio- uridine (s2U), 4-thio-uridine (s4U), 4-thio-pseudouridine, 2-thio-pseudouridine, 5-hydroxy- u,ridine (ho⁵U), 5-aminoallyl-uridine, 5-halo-uridine (e.g., 5-iodo-uridine or 5-bromo-uridine), 3- methyl-uridine (m³U), 5-methoxy-uridine (mo⁵U), uridine 5-oxyacetic acid (cmo⁵U), uridine 5- oxyacetic acid methyl ester (mcmo^{Λ}U), 5-carboxymethyl-uridine (cm^{s}U), 1 -carboxymethyl- pseudouridine, 5-carboxyhydroxymethyl-uridine (chm⁵U), 5-carboxyhydroxymethyl-uridine methyl ester (mchm⁵U), 5-methoxycarbonylmethyl-uridine (mcm⁵U), 5- methoxycarbonylmethyl-2-thio-uridine (mcm⁵s2U), 5-aminomethyl-2-thio-uridine (nm⁵s2U), 5- methylaminomethyl-uridine (mnm⁵U), 5-methylaminomethyl-2-thio-uridine (mnm⁵s2U), 5- methylaminomethyl-2-seleno-uridine (mnm⁵se²U), 5-carbamoylmethyl-uridine (ncm⁵U), 5-carboxymethylaminomethyl-uridine (cmnm⁵U), 5-carboxymethylaminomethyl-2-thio-uridine (cmnm \s2U), 5-propynyl-uridine, 1 -propynyl-pseudouridine, 5-taurinomethyl-uridine (xcm⁵U), 1 -taurinomethyl-pseudouridine, 5-taurinomethyl-2-thio-uridine(Trn⁵s2U), l-taurinomethyl-4- thio-pseudouridine, 5-methyl-uridine (m⁵U, i.e., having the nucleobase deoxythymine), 1- methyl-pseudouridine (lτl′ψ). 5-methyl-2-thio-uridine (m⁵s2U), 1-methyl-4-thio-pseudouridine (m′s \|/), 4-thio-1-methyl-pseudouridine, 3-methyl-pseudouridine (m′V), 2-thio-1-methyl-pseudouridine, 1 -methyl- 1 -deaza-pseudouridine, 2-thio- 1 -methyl- 1 -deaza-pseudouridine, dihydroundine (D), dihydropseudoundine, 5,6-dihydrouridine, 5-methyl-dihydrouridine (m⁵D), 2- thio-dihydrouridine, 2-thio-dihydropseudouridine, 2-methoxy-uridine, 2-methoxy-4-thio- uridine, 4-methoxy-pseudouridine, 4-methoxy-2-thio-pseudouridine, N 1 -methyl-pseudouridine, 3- (3-amino-3-carboxypropyl)uridine (acp³U), 1-methyl-3-(3-amino-3- carboxypropy pseudouridine 5-(isopentenylaminomethyl)uridine (inm⁵U), 5- (isopentenylaminomethy])-2-thio-uridine (inm⁵s2U), a-thio-uridine, 2′-0-methyl-uridine (Urn), 5,2′-0-dimethyl-uridine (m⁵Um), 2′-0-methyl-pseudouridine (ψπl), 2-thio-2′-0-methyl-uridine (s2Um), 5-methoxycarbonylmethyl-2′-0-methyl-uridine (mcm ⁵Um), 5-carbamoylmethyl-2′-0- methyl-uridine (ncm ⁵Um), 5-carboxymethylaminomethyl-2′-0-methyl-uridine (cmnm ⁵Um), 3,2′-0-dimethyl-uridine (m³Um), 5-(isopentenylaminomethyl)-2′-0-methyl-uridine (inm ⁵Um), 1-thio-uridine, deoxythymidine, 2′—F—ara-uridine, 2′—F—uridine, 2′—OH—ara-uridine, 5-(2- carbomethoxyvinyl) uridine, 5-[3-(l-E-propenylamino)uridine, pyrazolo[3,4-d]pyrimidines, xanthine, and hypoxanthine.

### Cytosine

[0680] In some embodiments, the modified nucleobase is a modified cytosine. Exemplary nucleobases and nucleosides having a modified cytosine include without limitation 5-aza- cytidine, 6-aza-cytidine, pseudoisocytidine, 3-methyl-cytidine (m³C), N4-acetyl-cytidine (act), 5- formyl-cytidine (f⁵C), N4-methyl-cytidine (m⁴C), 5-methyl-cytidine (m⁵C), 5-halo-cytidine (e.g., 5-iodo-cytidine), 5-hydroxymethyl-cytidine (hm⁵C), 1-methyl-pseudoisocytidine, pyrrolo- cytidine, pyrrolo-pseudoisocytidine, 2-thio-cytidine (s2C), 2-thio-5-methyl-cyridine, 4-thio- pseudoisocytidine, 4-thio- 1 -methyl-pseudoisocytidine, 4-thio-l -methyl- 1-deaza- pseudoisocytidine, 1-methyl- 1-deaza-pseudoisocytidine, zebularine, 5-aza-zebularine, 5-methyl- zebularine, 5-aza-2-thio-zebularine, 2-thio-zebularine, 2-methoxy-cytidine, 2-methoxy-5-methyl- cytidine, 4-methoxy-pseudoisocytidine, 4-methoxy- 1 -methyl-pseudoisocytidine, lysidine (k²C), a-thio-cytidine, 2′-0-methyl-cytidine (Cm), 5,2′-0-dimethyl-cytidine (m⁵Cm), N4-acetyl-2′-0- methyl-cytidine (ac⁴Cm), N4,2′-0-dimethyl-cytidine (m⁴Cm), 5-formyl-2′-0-methyl-cytidine (f ⁵Cm), N4,N4,2′-0-trimethyl-cytidine (m⁴₂Cm), 1 -thio-cytidine, 2′—F—ara-cytidine, 2′—F—cytidine, and 2′—OH—ara-cytidine.

### Adenine

[0681] In some embodiments, the modified nucleobase is a modified adenine. Exemplary nucleobases and nucleosides having a modified adenine include without limitation 2-amino- purine, 2,6-diaminopurine, 2-amino-6-halo-purine (e.g., 2-amino-6-chloro-purine), 6-halo-purine (e.g., 6-chloi -purine), 2-amino-6-methyl-purine, 8-azido-adenosine, 7-deaza-adenine, 7-deaza- 8-aza-adenine, 7-deaza-2-amino-purine, 7-deaza-8-aza-2-amino-purine, 7-deaza-2,6- diaminopurine, 7-deaza-8-aza-2,6-diaminopurine, 1-methyl-adenosine (m′A), 2-methyl-adenine (m A), N6-methyl-adenosine (m⁶A), 2-methylthio-N6-methyl-adenosine (ms2m⁶A), N6- isopentenyl-adenosine (i⁶A), 2-methylthio-N6-isopentenyl-adenosine (ms²i⁶A), N6-(cis- hydroxyisopentenyl)adenos′ine (io⁶A), 2-methylthio-N6-(cis-hydroxyisopentenyl)adenosine (ms2io⁶A), N6-glycinylcarbamoyl-adenosine (g⁶A), N6-threonylcarbamoyl-adenosine (t⁶A), N6- methyl-N6-threonylcarbamoyl-adenosine (m⁶t⁶A), 2-methylthio-N6-threonylcarbamoyl- adenosine (ms²g⁶A), N6,N6-dimethyl-adenosine (m⁶₂A), N6-hydroxynorvalylcarbamoyl- adenosine (hn⁶A), 2-methylthio-N6-hydroxynorvalylcarbamoyl-adenosine (ms2hn⁶A), N6- acetyl-adenosine (ac⁶A), 7-methyl-adenine, 2-methylthio-adenine, 2-methoxy-adenine, a-thio- adenosine, 2′-0-methyl-adenosine (Am), N⁶,2′-0-dimethyl-adenosine (m⁵Am), N⁶-Methyl-2′- deoxyadenosine, N6,N6,2′-0-trimethyl-adenosine (m⁶₂Am), 1,2′-0-dimethyl-adenosine (m′ Am), 2′-0-ribosyladenosine (phosphate) (Ar(p)), 2-amino-N6-methyl-purine, 1 -thio-adenosine, 8-azido-adenosine, 2′-F-ara-adenosine, 2′-F-adenosine, 2′-OH-ara-adenosine, and N6-( 19-amino-pentaoxanonadecyl)-adenosine.

### Guanine

[0682] In some embodiments, the modified nucleobase is a modified guanine. Exemplary nucleobases and nucleosides having a modified guanine include without limitation inosine (I), 1 - methyl-inosine (m ′1), wyosine (imG), methylwyosine (mimG), 4-demethyl-wyo″sine (imG- 14), isowyosine (imG2), wybutosine (yW), peroxywybutosine (o₂yW), hydroxywybutosine (OHyW), undemriodified hydroxywybutosine (OHyW*), 7-deaza-guanosine, queuosine (Q), epoxyqueuosine (oQ), galactosyl-queuosine (galQ), mannosyl-queuosine (manQ), 7-cyano-7- deaza-guanosine (preQ₀), 7-aminomethyI-7-deaza-guanosine (preQi), archaeosine (G⁺), 7-deaza- 8-aza-guanosine, 6-thio-guanosine, 6-thio-7-deaza-guanosine, 6-thio-7-deaza-8-aza-guanosine, 7-methyl-guanosine (m⁷G), 6-thio-7-methyl-guanosine, 7-methyl-inosine, 6-methoxy-guanosine, 1 -methyl-guanosine (m′G), N2-methyl-guanosine (m²G), N2,N2-dimethyl-guanosine (m²₂G), N2,7-dimethyl-guanosine (m²,7G), N2, N2,7-dimethyl-guanosine (m²,2,7G), 8-oxo-guanosine, 7-methyl-8-oxo-guanosine, 1 -meth thio-guanosine, N2-methyl-6-thio-guanosine, N2,N2- dimethyl-6-thio-guanosine, a-thio-guanosine, 2′-0-methyl-guanosine (Gm), N2-methyl-2′-0- methyl-guanosine (m3/4m), N2,N2-dimethyl-2′-0-methyl-guanosine (m²₂Gm), 1 -methyl-2′-0- methyl-guanosine (m’Gm), N2,7-dimethyl-2′-0-methyl-guanosine (m²,7Gm), 2′-0-methyl- inosine (Im), 1,2′-0-dimethyl-inosine (m’lm), 0⁶-phenyl-2′-deoxyinosine, 2′-0-ribosylguanosine (phosphate) (Gr(p)), 1 -thio-guanosine, 0⁶-methy]-guanosine, 0⁶-Methyl-2′-deoxyguanosine, 2′- F-ara-guanosine, and 2′-F-guanosine.

### Modified gRNAs

[0683] In some embodiments, the modified nucleic acids can be modified gRNAs. In some embodiments, gRNAs can be modified at the 3′ end. In this embodiment, the gRNAs can be modified at the 3′ terminal U ribose. For example, the two terminal hydroxyl groups of the U ribose can be oxidized to aldehyde groups and a concomitant opening of the ribose ring to afford a modified nucleoside, wherein U can be an unmodified or modified uridine.

[0684] In another embodiment, the 3′ terminal U can be modified with a 2′ 3′ cyclic phosphate, wherein U can be an unmodified or modified uridine. In some embodiments, the gRNA molecules may contain 3 nucleotides which can be stabilized against degradation, e.g., by incorporating one or more of the modified nucleotides described herein. In this embodiment, e.g., uridines can be replaced with modified uridines, e.g., 5-(2-amino)propyl uridine, and 5-bromo uridine, or with any of the modified uridines described herein; adenosines and guanosines can be replaced with modified adenosines and guanosines, e.g., with modifications at the 8-position, e.g., 8-bromo guanosine, or with any of the modified adenosines or guanosines described herein. In some embodiments, deaza nucleotides, e.g., 7- deaza-adenosine, can be incoiporated into the gRNA. In some embodiments, O- and N-alkylated nucleotides, e.g., N6-methyl andenosine, can be incorporated into the gRNA. In some embodiments, sugar-modified ribonucleotides can be incorporated, e.g., wherein the 2′ OH- group is replaced by a group selected from H, -OR, -R (wherein R can be, e.g., methyl, alkyl, cycloalkyl, aryl, aralkyl, heteroaryl or sugar), halo, -SH, -SR (wherein R can be, e.g., alkyl, cycloalkyl, aryl, aralkyl, heteroaryl or sugar), amino (wherein amino can be, e.g., NH₂; alkylamino, dialkylamino, heterocyclyl, arylamino, diarylamino, heteroarylamino, diheteroarylamino, or amino acid); or cyano (-CN). In some embodiments, the phosphate backbone can be modified as described herein, e.g., with a phosphothioate group. In some embodiments, the nucleotides in the overhang region of the gRNA can each independently be a modified or unmodified nucleotide including, but not limited to 2′-sugar modified, such as, 2-F 2′-0-methyl, thymidine (T), 2′-O-methoxyethyl-5-methyluridine (Teo), 2′-O-methoxyethyladenosine (Aeo), 2′-O-methoxyethyl- 5-methylcytidine (m5Ceo), and any combinations thereof.

[0685] In an embodiment, one or more or all of the nucleotides in single stranded overhang of an RNA molecule, e.g., a gRNA molecule, are deoxynucleotides.

### XIV. Pharmaceutical Compositions

[0686] Pharmaceutical compositions of the present invention may comprise a gRNA molecule described herein, e.g., a plurality of gRNA molecules as described herein, or a cell (e.g., a population of cells, e.g., a population of hematopoietic stem cells, e.g., of CD34+ cells) comprising one or more cells modified with one or more gRNA molecules described herein, in combination with one or more pharmaceutically or physiologically acceptable carriers, diluents or excipients. Such compositions may comprise buffers such as neutral buffered saline, phosphate buffered saline and the like; carbohydrates such as glucose, mannose, sucrose or dextrans, mannitol; proteins; polypeptides or amino acids such as glycine; antioxidants; chelating agents such as EDTA or glutathione; adjuvants (e.g., aluminum hydroxide); and preservatives. Compositions of the present invention are in one aspect formulated for intravenous administration.

[0687] Pharmaceutical compositions of the present invention may be administered in a manner appropriate to the disease to be treated (or prevented). The quantity and frequency of administration will be determined by such factors as the condition of the patient, and the type and severity of the patient’s disease, although appropriate dosages may be determined by clinical trials.

[0688] In one embodiment, the pharmaceutical composition is substantially free of, e.g., there are no detectable levels of a contaminant, e.g., selected from the group consisting of endotoxin, mycoplasma, mouse antibodies, pooled human serum, bovine serum albumin, bovine serum, culture media components, unwanted CRISPR system components, a bacterium and a fungus. In one embodiment, the bacterium is at least one selected from the group consisting of Alcaligenesfaecalis, Candidaalbicans, Escherichiacoli, Haemophilusinfluenza, Neisseriameningitides, Pseudomonasaeruginosa, Staphylococcusaureus, Streptococcuspneumonia, and Streptococcuspyogenes group A.

[0689] The administration of the subject compositions may be carried out in any convenient manner, including by aerosol inhalation, injection, ingestion, transfusion, implantation or transplantation. The compositions described herein may be administered to a patient transarterially, subcutaneously, intradermally, intratumorally, intranodally, intramedullary, intramuscularly, by intravenous (i.v.) injection, or intraperitoneally. In one aspect, the compositions of the present invention are administered to a patient by intradermal or subcutaneous injection. In one aspect, the cell compositions of the present invention are administered by i.v. injection.

[0690] The dosage of the above treatments to be administered to a patient will vary with the precise nature of the condition being treated and the recipient of the treatment. The scaling of dosages for human administration can be performed according to art-accepted practices.

### XV. Cells

[0691] The invention also relates to cells comprising a gRNA molecule of the invention, or nucleic acid encoding said gRNA molecules.

[0692] In an aspect the cells are cells made by a process described herein.

[0693] In embodiments, the cells are hematopoietic stem cells (e.g., hematopoietic stem and progenitor cells; HSPCs), for example, CD34+ stem cells. In embodiments, the cells are CD34+/CD90+ stem cells. In embodiments, the cells are CD34+/CD90- stem cells. In embodiments, the cells are human hematopoietic stem cells. In embodiments, the cells are autologous. In embodiments, the cells are allogeneic.

[0694] In embodiments, the cells are derived from bone marrow, e.g., autologous bone marrow. In embodiments, the cells are derived from peripheral blood, e.g., mobilized peripheral blood, e.g., autologous mobilized peripheral blood. In embodiments employing moblized peripheral blood, the cells are isoalted from patients who have been administered a mobilization agent. In embodiments, the mobilization agent is G-CSF. In embodiments, the mobilization agent is Plerixafor® (AMD3100). In embodiments, the mobilization agent comprises a combination of G-CSF and Plerixafor® (AMD3100)). In embodiments, the cells are derived from umbilical cord blood, e.g., allogeneic umbilical cord blood. In embodiments, the cells are derived from a hemoglobinopathy patient, for example a patient with sickle cell disease or a patient with a thalassemia, e.g., beta-thalassemia.

[0695] In embodiments, the cells are mammalian. In embodiments, the cells are human. In embodiments, the cells are derived from a hemoglobinopathy patient, for example a patient with sickle cell disease or a patient with a thalassemia, e.g., beta-thalassemia.

[0696] In an aspect, the invention provides a cell comprising a modification or alteration, e.g., an indel, at or near (e.g., within 20, 19, 18, 17, 16, 15, 14, 13, 12, 11, 10, 9, 8, 7, 6, 5, 4, 3, 2 or 1 nucleotides of) a nucleic acid sequence having complementarity to a gRNA molecule or gRNA molecules, e.g., as described herein, introduced into said cells, e.g., as part of a CRISPR system as described herein. In embodiments, the cell is a CD34+ cell. In embodiments, the altered or modified cell, e.g., CD34+ cell, maintains the ability to differentiate into cells of multiple lineages, e.g., maintains the ability to differentiate into cells of the erythroid lineage. In embodiments, the altered or modified cell, e.g., CD34+ cell, has undergone or is able to undergo at least 2, at least 3, at least 4, at least 5, at least 6, at least 7, at least 8, at least 9 or at least 10 or more doublings in culture, e.g., in culture comprising a stem cell expander, e.g., (S)-2-(6-(2-(1H-indol-3-yl)ethylamino)-2-(5-fluoropyridin-3-yl)-9H-purin-9-yl)propan-l-ol. In embodiments, the altered or modified cell, e.g., CD34+ cell, has undergone or is able to undergo at least 5, e.g., about 5, doublings in culture, e.g., in culture comprising a stem cell expander molecule, e.g., as described herein, e.g., (S)-2-(6-(2-(lH-indol-3-yl)ethylamino)-2-(5-fluoropyridin-3-yl)-9H-purin-9-yl)propan-l-ol. In embodiments the altered or modified cell, e.g., CD34+ cell, exhibits and/or is able to differentiate into a cell, e.g., into a cell of the erythroid lineage, e.g., into a red blood cell, that exhibits increased fetal hemoglobin level (e.g., expression level and/or protein level), e.g., at least a 20% increase in fetal hemoglobin protein level, relative to a similar unmodified or unaltered cell. In embodiments the altered or modified cell, e.g., CD34+ cell, exhibits and/or is able to differentiate into a cell, e.g., into a cell of the erythroid lineage, e.g., into a red blood cell, that exhibits increased fetal hemoglobin level (e.g., expression level and/or protein level), relative to a similar unmodified or unaltered cell, e.g., produces at least 6 picograms, e.g., at least 7 picograms, at least 8 picograms, at least 9 picograms, or at least 10 picograms of fetal hemoglobin. In embodiments the altered or modified cell, e.g., CD34+ cell, exhibits and/or is able to differentiate into a cell, e.g., into a cell of the erythroid lineage, e.g., into a red blood cell, that exhibits increased fetal hemoglobin level (e.g., expression level and/or protein level), relative to a similar unmodified or unaltered cell, e.g., produces about 6 to about 12, about about 6 to about 7, about 7 to about 8, about 8 to about 9, about 9 to about 10, about 10 to about 11 or about 11 to about 12 picograms of fetal hemoglobin.

[0697] In an aspect, the invention provides a population of cells comprising cells having a modification or alteration, e.g., an indel, at or near (e.g., within 20, 19, 18, 17, 16, 15, 14, 13, 12, 11, 10, 9, 8, 7, 6, 5, 4, 3, 2 or 1 nucleotides of) a nucleic acid sequence having complementarity to a gRNA molecule or gRNA molecules, e.g., as described herein, introduced into said cells, e.g., as part of a CRISPR system as described herein. In embodiments, at least 50%, e.g., at least 60%, at least 70%, at least 80% or at least 90% of the cells of the population have the modification or alteration (e.g., have at least one modification or alteration), e.g., as measured by NGS, e.g., as described herein, e.g., at day two following introduction of the gRNA and/or CRISPR system of the invention. In embodiments, at least 90%, e.g., at least 91%, at least 92%, at least 93%, at least 94%, at least 95%, at least 96%, at least 97%, at least 98% or at least 99% of the cells of the population have the modification or alteration (e.g., have at least one modification or alteration), e.g., as measured by NGS, e.g., as described herein, e.g., at day two following introduction of the gRNA and/or CRISPR system of the invention. In embodiments, the population of cells comprise CD34+ cells, e.g., comprise at least about 50%, at least about 60%, at least about 70%, at least about 80%, at least about 90%, at least about 95% or at least about 98% CD34+ cells. In embodiments, the population of cells comprising the altered or modified cells, e.g., CD34+ cells, maintain the ability to produce, e.g., differentiate into, cells of multiple lineages, e.g., maintains the ability to produce, e.g., differentiate into, cells of the erythroid lineage. In embodiments, the population of cells, e.g., population of CD34+ cells, has undergone or is able to undergo at least 2, at least 3, at least 4, at least 5, at least 6, at least 7, at least 8, at least 9 or at least 10 or more population doublings in culture, e.g., in culture comprising a stem cell expander, e.g., (S)-2-(6-(2-(lH-indol-3-yl)ethylamino)-2-(5-fluoropyridin-3-yl)-9H-purin-9-yl)propan-1-ol. In embodiments, the population of altered or modified cells, e.g., population of CD34+ cells, has undergone or is capable of undergoing at least 5, e.g., about 5, population doublings in culture, e.g., in culture comprising a stem cell expander molecule, e.g., as described herein, e.g., (S)-2-(6-(2-(lH-indol-3-yl)ethylamino)-2-(5-fluoropyridin-3-yl)-9H-purin-9-yl)propan-l-ol. In embodiments the population of cells comprising altered or modified cells, e.g., CD34+ cells, exhibits and/or is able to differentiate into a population of cells, e.g., into a population of cells of the erythroid lineage, e.g., into a population of red blood cells, that exhibits increased fetal hemoglobin level (e.g., expression level and/or protein level), e.g., at least a 20% increase in fetal hemoglobin protein level, relative to a similar unmodified or unaltered cells. In embodiments the population of cells comprising altered or modified cells, e.g., CD34+ cells, exhibits and/or is able to differentiate into a population of cells, e.g., into a population of cells of the erythroid lineage, e.g., into a population of red blood cells, that exhibits increased fetal hemoglobin level (e.g., expression level and/or protein level), relative to a similar unmodified or unaltered cells, e.g., comprises cells that produce at least 6 picograms, e.g., at least 7 picograms, at least 8 picograms, at least 9 picograms, or at least 10 picograms of fetal hemoglobin per cell. In embodiments the population of altered or modified cells, e.g., CD34+ cells, exhibits and/or is able to differentiate into a population of cells, e.g., into a population of cells of the erythroid lineage, e.g., into a population of red blood cells, that exhibits increased fetal hemoglobin level (e.g., expression level and/or protein level), relative to a similar unmodified or unaltered cell, e.g., comprises cells that produce about 6 to about 12, about about 6 to about 7, about 7 to about 8, about 8 to about 9, about 9 to about 10, about 10 to about 11 or about 11 to about 12 picograms of fetal hemoglobin per cell.

[0698] In embodiments, the population of cells, e.g., as described herein, comprises at least about 1e3 cells. In embodiments, the population of cells, e.g., as described herein, comprises at least about 1e4 cells. In embodiments, the population of cells, e.g., as described herein, comprises at least about 1e5 cells. In embodiments, the population of cells, e.g., as described herein, comprises at least about 1e6 cells. In embodiments, the population of cells, e.g., as described herein, comprises at least about 1e7 cells. In embodiments, the population of cells, e.g., as described herein, comprises at least about 1e8 cells. In embodiments, the population of cells, e.g., as described herein, comprises at least about 1e9 cells. In embodiments, the population of cells, e.g., as described herein, comprises at least about 1e10 cells. In embodiments, the population of cells, e.g., as described herein, comprises at least about 1e11 cells. In embodiments, the population of cells, e.g., as described herein, comprises at least about 1e12 cells. In embodiments, the population of cells, e.g., as described herein, comprises at least about 1e13 cells per kilogram body weight of the patient to which they are to be administered. In embodiments, the population of cells, e.g., as described herein, comprises at least about 1e6 cells per kilogram body weight of the patient to which they are to be administered. In embodiments, the population of cells, e.g., as described herein, comprises at least about 2e6 cells per kilogram body weight of the patient to which they are to be administered. In embodiments, the population of cells, e.g., as described herein, comprises at least about 3e6 cells per kilogram body weight of the patient to which they are to be administered. In embodiments, the population of cells, e.g., as described herein, comprises at least about 4e6 cells per kilogram body weight of the patient to which they are to be administered. In embodiments, the population of cells, e.g., as described herein, comprises at least about 5e6 cells per kilogram body weight of the patient to which they are to be administered. In embodiments, the population of cells, e.g., as described herein, comprises at least about 6e6 cells per kilogram body weight of the patient to which they are to be administered. In embodiments, the population of cells, e.g., as described herein, comprises at least about 7e6 cells per kilogram body weight of the patient to which they are to be administered. In embodiments, the population of cells, e.g., as described herein, comprises at least about 8e6 cells per kilogram body weight of the patient to which they are to be administered. In embodiments, the population of cells, e.g., as described herein, comprises at least about 9e6 cells per kilogram body weight of the patient to which they are to be administered. In embodiments, the population of cells, e.g., as described herein, comprises at least about 1e7 cells per kilogram body weight of the patient to which they are to be administered. In embodiments, the population of cells, e.g., as described herein, comprises at least about 2e7 cells per kilogram body weight of the patient to which they are to be administered. In embodiments, the population of cells, e.g., as described herein, comprises at least about 3e7 cells per kilogram body weight of the patient to which they are to be administered. In embodiments, the population of cells, e.g., as described herein, comprises at least about 4e7 cells per kilogram body weight of the patient to which they are to be administered. In embodiments, the population of cells, e.g., as described herein, comprises at least about 5e7 cells per kilogram body weight of the patient to which they are to be administered. In embodiments, the population of cells, e.g., as described herein, comprises at least about 6e7 cells per kilogram body weight of the patient to which they are to be administered. In embodiments, the population of cells, e.g., as described herein, comprises at least about 7e7 cells per kilogram body weight of the patient to which they are to be administered. In embodiments, the population of cells, e.g., as described herein, comprises at least about 8e7 cells per kilogram body weight of the patient to which they are to be administered. In embodiments, the population of cells, e.g., as described herein, comprises at least about 9e7 cells per kilogram body weight of the patient to which they are to be administered. In embodiments, the population of cells, e.g., as described herein, comprises at least about 1e8 cells per kilogram body weight of the patient to which they are to be administered. In any of the aforementioned embodiments, the population of cells may comprise at least about 50% (for example, at least about 60%, at least about 70%, at least about 80%, at least about 90%, at least about 95% or at least about 99%) HSPCs, e.g., CD34+ cells. In any of the aforementioned embodiments, the population of cells may comprise about 60% HSPCs, e.g., CD34+ cells. In an embodiment, the population of cells, e.g., as described herein, comprises about 3e7 cells and comprises about 2e7 HSPCs, e.g., CD34+ cells. As used throughout this application, the scientific notation [number]e[number] is given its ordinary meaning. Thus, for example, 2e6 is equivalent to 2 x 10⁶ or 2,000,000.

[0699] In embodiments, the population of cells, e.g., as described herein, comprises at least about 1e6 HSPCs, e.g., CD34+ cells, per kilogram body weight of the patient to which they are to be administered. In embodiments, the population of cells, e.g., as described herein, comprises at least about 1.5e6 HSPCs, e.g., CD34+ cells, per kilogram body weight of the patient to which they are to be administered. In embodiments, the population of cells, e.g., as described herein, comprises at least about 2e6 HSPCs, e.g., CD34+ cells, per kilogram body weight of the patient to which they are to be administered. In embodiments, the population of cells, e.g., as described herein, comprises at least about 3e6 HSPCs, e.g., CD34+ cells, per kilogram body weight of the patient to which they are to be administered. In embodiments, the population of cells, e.g., as described herein, comprises at least about 4e6 HSPCs, e.g., CD34+ cells, per kilogram body weight of the patient to which they are to be administered. In embodiments, the population of cells, e.g., as described herein, comprises at least about 5e6 HSPCs, e.g., CD34+ cells, per kilogram body weight of the patient to which they are to be administered. In embodiments, the population of cells, e.g., as described herein, comprises at least about 6e6 HSPCs, e.g., CD34+ cells, per kilogram body weight of the patient to which they are to be administered. In embodiments, the population of cells, e.g., as described herein, comprises at least about 7e6 HSPCs, e.g., CD34+ cells, per kilogram body weight of the patient to which they are to be administered. In embodiments, the population of cells, e.g., as described herein, comprises at least about 8e6 HSPCs, e.g., CD34+ cells, per kilogram body weight of the patient to which they are to be administered. In embodiments, the population of cells, e.g., as described herein, comprises at least about 9e6 HSPCs, e.g., CD34+ cells, per kilogram body weight of the patient to which they are to be administered. In embodiments, the population of cells, e.g., as described herein, comprises at least about 1e7 HSPCs, e.g., CD34+ cells, per kilogram body weight of the patient to which they are to be administered. In embodiments, the population of cells, e.g., as described herein, comprises at least about 2e7 HSPCs, e.g., CD34+ cells, per kilogram body weight of the patient to which they are to be administered. In embodiments, the population of cells, e.g., as described herein, comprises at least about 3e7 HSPCs, e.g., CD34+ cells, per kilogram body weight of the patient to which they are to be administered. In embodiments, the population of cells, e.g., as described herein, comprises at least about 4e7 HSPCs, e.g., CD34+ cells, per kilogram body weight of the patient to which they are to be administered. In embodiments, the population of cells, e.g., as described herein, comprises at least about 5e7 HSPCs, e.g., CD34+ cells, per kilogram body weight of the patient to which they are to be administered. In embodiments, the population of cells, e.g., as described herein, comprises at least about 6e7 HSPCs, e.g., CD34+ cells, per kilogram body weight of the patient to which they are to be administered. In embodiments, the population of cells, e.g., as described herein, comprises at least about 7e7 HSPCs, e.g., CD34+ cells, per kilogram body weight of the patient to which they are to be administered. In embodiments, the population of cells, e.g., as described herein, comprises at least about 8e7 HSPCs, e.g., CD34+ cells, per kilogram body weight of the patient to which they are to be administered. In embodiments, the population of cells, e.g., as described herein, comprises at least about 9e7 HSPCs, e.g., CD34+ cells, per kilogram body weight of the patient to which they are to be administered. In embodiments, the population of cells, e.g., as described herein, comprises at least about 1e8 HSPCs, e.g., CD34+ cells, per kilogram body weight of the patient to which they are to be administered. In embodiments, the population of cells, e.g., as described herein, comprises at least about 2e8 HSPCs, e.g., CD34+ cells, per kilogram body weight of the patient to which they are to be administered. In embodiments, the population of cells, e.g., as described herein, comprises at least about 3e8 HSPCs, e.g., CD34+ cells, per kilogram body weight of the patient to which they are to be administered. In embodiments, the population of cells, e.g., as described herein, comprises at least about 4e8 HSPCs, e.g., CD34+ cells, per kilogram body weight of the patient to which they are to be administered. In embodiments, the population of cells, e.g., as described herein, comprises at least about 5e8 HSPCs, e.g., CD34+ cells, per kilogram body weight of the patient to which they are to be administered.

[0700] In embodiments, the population of cells, e.g., as described herein, comprises about 1e6 HSPCs, e.g., CD34+ cells, per kilogram body weight of the patient to which they are to be administered. In embodiments, the population of cells, e.g., as described herein, comprises about 1.5e6 HSPCs, e.g., CD34+ cells, per kilogram body weight of the patient to which they are to be administered. In embodiments, the population of cells, e.g., as described herein, comprises about 2e6 HSPCs, e.g., CD34+ cells, per kilogram body weight of the patient to which they are to be administered. In embodiments, the population of cells, e.g., as described herein, comprises about 3e6 HSPCs, e.g., CD34+ cells, per kilogram body weight of the patient to which they are to be administered. In embodiments, the population of cells, e.g., as described herein, comprises about 4e6 HSPCs, e.g., CD34+ cells, per kilogram body weight of the patient to which they are to be administered. In embodiments, the population of cells, e.g., as described herein, comprises about 5e6 HSPCs, e.g., CD34+ cells, per kilogram body weight of the patient to which they are to be administered. In embodiments, the population of cells, e.g., as described herein, comprises about 6e6 HSPCs, e.g., CD34+ cells, per kilogram body weight of the patient to which they are to be administered. In embodiments, the population of cells, e.g., as described herein, comprises about 7e6 HSPCs, e.g., CD34+ cells, per kilogram body weight of the patient to which they are to be administered. In embodiments, the population of cells, e.g., as described herein, comprises about 8e6 HSPCs, e.g., CD34+ cells, per kilogram body weight of the patient to which they are to be administered. In embodiments, the population of cells, e.g., as described herein, comprises about 9e6 HSPCs, e.g., CD34+ cells, per kilogram body weight of the patient to which they are to be administered. In embodiments, the population of cells, e.g., as described herein, comprises about 1e7 HSPCs, e.g., CD34+ cells, per kilogram body weight of the patient to which they are to be administered. In embodiments, the population of cells, e.g., as described herein, comprises about 2e7 HSPCs, e.g., CD34+ cells, per kilogram body weight of the patient to which they are to be administered. In embodiments, the population of cells, e.g., as described herein, comprises about 3e7 HSPCs, e.g., CD34+ cells, per kilogram body weight of the patient to which they are to be administered. In embodiments, the population of cells, e.g., as described herein, comprises about 4e7 HSPCs, e.g., CD34+ cells, per kilogram body weight of the patient to which they are to be administered. In embodiments, the population of cells, e.g., as described herein, comprises about 5e7 HSPCs, e.g., CD34+ cells, per kilogram body weight of the patient to which they are to be administered. In embodiments, the population of cells, e.g., as described herein, comprises about 6e7 HSPCs, e.g., CD34+ cells, per kilogram body weight of the patient to which they are to be administered. In embodiments, the population of cells, e.g., as described herein, comprises about 7e7 HSPCs, e.g., CD34+ cells, per kilogram body weight of the patient to which they are to be administered. In embodiments, the population of cells, e.g., as described herein, comprises about 8e7 HSPCs, e.g., CD34+ cells, per kilogram body weight of the patient to which they are to be administered. In embodiments, the population of cells, e.g., as described herein, comprises about 9e7 HSPCs, e.g., CD34+ cells, per kilogram body weight of the patient to which they are to be administered. In embodiments, the population of cells, e.g., as described herein, comprises about 1e8 HSPCs, e.g., CD34+ cells, per kilogram body weight of the patient to which they are to be administered. In embodiments, the population of cells, e.g., as described herein, comprises about 2e8 HSPCs, e.g., CD34+ cells, per kilogram body weight of the patient to which they are to be administered. In embodiments, the population of cells, e.g., as described herein, comprises about 3e8 HSPCs, e.g., CD34+ cells, per kilogram body weight of the patient to which they are to be administered. In embodiments, the population of cells, e.g., as described herein, comprises about 4e8 HSPCs, e.g., CD34+ cells, per kilogram body weight of the patient to which they are to be administered. In embodiments, the population of cells, e.g., as described herein, comprises about 5e8 HSPCs, e.g., CD34+ cells, per kilogram body weight of the patient to which they are to be administered.

[0701] In embodiments, the population of cells, e.g., as described herein, comprises from about 2e6 to about 10e6 HSPCs, e.g., CD34+ cells, per kilogram body weight of the patient to which they are to be administered. In embodiments, the population of cells, e.g., as described herein, comprises from 2e6 to 10e6 HSPCs, e.g., CD34+ cells, per kilogram body weight of the patient to which they are to be administered.

[0702] The cells of the invention may comprise a gRNA molecule of the present invention, or nucleic acid encoding said gRNA molecule, and a Cas9 molecule of the present invention, or nucleic acid encoding said Cas9 molecule. In an embodiment, the cells of the invention may comprise a ribonuclear protein (RNP) complex which comprises a gRNA molecule of the invention and a Cas9 molecule of the invention.

[0703] The cells of the invention are preferrably modified to comprise a gRNA molecule of the invention ex vivo, for example by a method described herein, e.g., by electroporation or by TRIAMF (as described in patent application PCT/US2017/54110, incorporated herein by reference in its entirety).

[0704] The cells of the invention include cells in which expression of one or more genes has been altered, for example, reduced or inhibited, by introduction of a CRISPR system comprising a gRNA of the invention. For example, the cells of the present invention may have a reduced level of beta globin (e.g., hemoglobin beta comprising a sickling mutation) expression relative to unmodified cells. As another example, the cells of the present invention may have an increased level of fetal hemoglobin expression relative to unmodified cells. Alternatively, or in addition, a cell of the invention may give rise, e.g., differentiate into, another type of cell, e.g., an erythrocyte, that has an increased level of fetal hemoglobin expression relative to cells differentiated from unmodified cells. In embodiments, the increase in level of fetal hemoglobin is at least about 20%, at least about 30%, at least about 40% or at least about 50%. Alternatively, or in addition, a cell of the invention may give rise, e.g., differentiate into, another type of cell, e.g., an erythrocyte, that has a reduced level of beta globin (e.g., hemoglobin beta comprising a sickling mutation, also referred to herein as sickle beta globin) expression relative to cells differentiated from unmodified cells. In embodiments, the decrease in level of sickle beta-globin is at least about 20%, at least about 30%, at least about 40% or at least about 50%.

[0705] The cells of the invention include cells in which expression of one or more genes has been altered, for example, reduced or inhibited, by introduction of a CRISPR system comprising a gRNA of the invention. For example, the cells of the present invention may have a reduced level of hemoglobin beta, for example a mutated or wild-type hemoglobin beta, expression relative to unmodified cells. In another aspect, the invention provides cells which are derived from, e.g., differentiated from, cells in which a CRISPR system comprising a gRNA of the invention has been introduced. In such aspects, the cells in which the CRISPR system comprising the gRNA of the invention has been introduced may not exhibit the reduced level of hemoglobin beta, for example a mutated or wild-type hemoglobin beta, but the cells derived from, e.g., differentiated from, said cells exhibit the reduced level of hemoglobin beta, for example a mutated or wild-type hemoglobin beta. In embodiments, the derivation, e.g., differentation, is accomplished in vivo (e.g., in a patient, e.g., in a hemoglobinopathy patient, e.g., in a patient with sickle cell disease or a thalassemia, e.g., beta thalassemia). In embodiments the cells in which the CRISPR system comprising the gRNA of the invention has been introduced are CD34+ cells and the cells derived, e.g., differentiated, therefrom are of the erythroid lineage, e.g., red blood cells.

[0706] The cells of the invention include cells in which expression of one or more genes has been altered, for example, increased or promoted, by introduction of a CRISPR system comprising a gRNA of the invention. For example, the cells of the present invention may have an increased level of fetal hemoglobin expression relative to unmodified cells. In another aspect, the invention provides cells which are derived from, e.g., differentiated from, cells in which a CRISPR system comprising a gRNA of the invention has been introduced. In such aspects, the cells in which the CRISPR system comprising the gRNA of the invention has been introduced may not exhibit the increased level of fetal hemoglobin but the cells derived from, e.g., differentiated from, said cells exhibit the increased level of fetal hemoglobin. In embodiments, the derivation, e.g., differentation, is accomplished in vivo (e.g., in a patient, e.g., in a hemoglobinopathy patient, e.g., in a patient with sickle cell disease or a thalassemia, e.g., beta thalassemia). In embodiments the cells in which the CRISPR system comprising the gRNA of the invention has been introduced are CD34+ cells and the cells derived, e.g., differentiated, therefrom are of the erythroid lineage, e.g., red blood cells.

[0707] In another aspect, the invention relates to cells which include an indel at (e.g., within) or near (e.g., within 20, 19, 18, 17, 16, 15, 14, 13, 12, 11, 10, 9, 8, 7, 6, 5, 4, 3, 2 or 1 nucleotides of) a nucleic acid sequence having complementarity to the gRNA molecule (e.g., the target sequence of the gRNA molecule) or gRNA molecules introduced into said cells. In embodiments, the indel is a frameshift indel. In embodiments, the cell includes a large deletion, for example a deletion of 1 kb, 2 kb, 3 kb, 4 kb, 5 kb, 6 kb or more. In embodiments, the large deletion comprises nucleic acids disposed between two binding sites for the gRNA moleucle or gRNA molecules introduced into said cells.

[0708] In an aspect, the invention relates to a population of cells (e.g., as described herein), e.g., a population of HSPCs, which comprises cells which include an indel at or near (e.g., within 20, 19, 18, 17, 16, 15, 14, 13, 12, 11, 10, 9, 8, 7, 6, 5, 4, 3, 2 or 1 nucleotides of) a nucleic acid sequence having complementarity to a gRNA molecule or gRNA molecules, e.g., as described herein, introduced into said cells, e.g., as described herein. In embodiments, the indel is a frameshift indel. In embodiments, the cell population includes cells which comprise a large deletion, for example a deletion of 1 kb, 2 kb, 3 kb, 4 kb, 5 kb, 6 kb or more. In embodiments, the large deletion comprises nucleic acids disposed between two binding sites for the gRNA moleucle or gRNA molecules introduced into said cells. In embodiments, 20%-100% of the cells of the population include said large deletion, indel or indels. In embodiments, 30%-100% of the cells of the population include said large deletion, indel or indels. In embodiments, 40%-100% of the cells of the population include said large deletion, indel or indels. In embodiments, 50%-100% of the cells of the population include said large deletion, indel or indels. In embodiments, 60%-100% of the cells of the population include said large deletion, indel or indels. In embodiments, 70%-100% of the cells of the population include said large deletion, indel or indels. In embodiments, 80%-100% of the cells of the population include said large deletion, indel or indels. In embodiments, 90%-100% of the cells of the population include said large deletion, indel or indels. In embodiments, the population of cells retains the ability to differentiate into multiple cell types, e.g., maintains the ability to differentiate into cells of erythroid lineage, e.g., red blood cells, e.g., in a subject, e.g., a human. In embodiments, the edited cells (e.g., HSPC cells, e.g., CD34+ cell, e.g., any subpopulation of CD34+ cell, e.g., as described herein) maintain the ability (and/or do) to proliferate, e.g., in cell culture, e.g., proliferate at least 5-fold, at least 10-fold, at least 15-fold, at least 20-fold, at least 25-fold, at least 30-fold, at least 35-fold, at least 40-fold, at least 45-fold, at least 50-fold or more, e.g., after 1, 2, 3, 4, 5, 6, 7 or more days (e.g., after about 1or about 2 days) in cell culture, e.g., in a cell culture medium described herein, e.g., a cell culture medium comprising one or more stem cell expanders, e.g., compound 4. In embodiments, the edited and differentiated cells (e.g., red blood cells) maintain the ability to proliferate, e.g., proliferate at least 5-fold, at least 10-fold, at least 15-fold, at least 20-fold, at least 25-fold, at least 30-fold, at least 35-fold, at least 40-fold, at least 45-fold, at least 50-fold or more after 7 days in erythroid differentiation medium (EDM), e.g., as described in the Examples, and/or, proliferate at least 30-fold, at least 35-fold, at least 40-fold, at least 45-fold, at least 50-fold, at least 55-fold, at least 60-fold, at least 65-fold, at least 70-fold, at least 75-fold, at least 80-fold, at least 85-fold, at least 90-fold, at least 95-fold, at least 100-fold, at least 110-fold, at least 120-fold, at least 130-fold, at least 140-fold, at least 150-fold, at least 200-fold, at least 300-fold, at least 400-fold, at least 500-fold, at least 600-fold, at least 700-fold, at least 800-fold, at least 900-fold, at least 1000-fold, at least 1100-fold, at least 1200-fold, at least 1300-fold, at least 1400-fold, at least 1500-fold or more after 21 days, e.g., in erythroid differentiation medium (EDM), e.g., as described in the Examples or in a subject (e.g., a mammal, e.g., a human).

[0709] In an embodiment, the invention provides a population of cells, e.g., CD34+ cells, of which at least 90%, e.g., at least 95%, e.g., at least 98%, of the cells of the population comprise a large deletion or one or more indels, e.g., as described herein.Without being bound by theory, it is believed that introduction of a gRNA molecule or CRISPR system as described herein into a populaiton of cells produces a pattern of indels and/or large deletions in said population, and thus, each cell of the population which comprises an indel and/or large deletion may not exhibit the same indel and/or large deletion. In embodiments, the indel and/or large deletion comprises one or more nucleic acids at or near a site complementary to the targeting domain of a gRNA molecule described herein; whrein said cells maintain the ability to differentiate into cells of an erythroid lineage, e.g., red blood cells; and/or wherein said cells differentiated from the population of cells have an increased level of fetal hemoglobin (e.g., the population has a higher % F cells) relative to cells differentiated from a similar population of unmodified cells. In embodiments, the population of cells has undergone at least a 2-fold expansion ex vivo, e.g., in the media comprising one or more stem cell expanders, e.g., comprising (S)-2-(6-(2-(1H-indol-3-yl)ethylamino)-2-(5-fluoropyridin-3-yl)-9H-purin-9-yl)propan-l-ol. In embodiments, the population of cells has undergone at least a 5-fold expansion ex vivo, e.g., in the media comprising one or more stem cell expanders, e.g., comprising (S)-2-(6-(2-(lH-indol-3-yl)ethylamino)-2-(5-fluoropyridin-3-yl)-9H-purin-9-yl)propan-1-ol.

[0710] In embodiments, the indel is less than about 50 nucleotides, e.g., less than about 45, less than about 40, less than about 35, less than about 30 or less than about 25 nucelotides. In embodiments, the indel is less than about 25 nucleotides. In embodiments, the indel is less than about 20 nucleotides. In embodiments, the indel is less than about 15 nucelotides. In embodiments, the indel is less than about 10 nucleotides. In embodiments, the indel is less than about 9 nucleotides. In embodiments, the indel is less than about 9 nucleotides. In embodiments, the indel is less than about 7 nucleotides. In embodiments, the indel is less than about 6 nucleotides. In embodiments, the indel is less than about 5 nucleotides. In embodiments, the indel is less than about 4 nucleotides. In embodiments, the indel is less than about 3 nucleotides. In embodiments, the indel is less than about 2 nucleotides. In any of the aforementioned embodiments, the indel is at least 1nucleotide. In embodiments, the indel is 1 nucleotide. In embodiments, the large deletion comprises about 1 kb of DNA. In embodiments, the large deletion comprises about 2 kb of DNA. In embodiments, the large deletion comprises about 3 kb of DNA. In embodiments, the large deletion comprises about 4 kb of DNA. In embodiments, the large deletion comprises about 5 kb of DNA. In embodiments, the large deletion comprises about 6 kb of DNA.

[0711] In embodiments, a population of cells (e.g., as described herein) comprises a pattern of indels and/or large deletions comprising any 1, 2, 3, 4, 5, or 6 of the most frequently detected indels associated with a CRISPR system comprising a gRNA molecule described herein. In embodiments, the indels and/or large deletions are detected by a method described herein, e.g., by NGS or qPCR.

[0712] In an aspect, the cell or population of cells (e.g., as described herein) does not comprise an indel or large deletion at an off-target site, e.g., as detected by a method described herein.

[0713] In embodiments, the progeny, e.g., differentiated progeny, e.g., erythroid (e.g., red blood cell) progeny of the cell or population of cells described herein (e.g., derived from a sickle cell disease patient) produce a lower level of sickle beta globin and/or a higher level of gamma globin than unmodified cells. In embodiments, the progeny, e.g., differentiated progeny, e.g., erythroid (e.g., red blood cell) progeny of the cell or population of cells described herein (e.g., derived from a sickle cell disease patient) produce a lower level of sickle beta globin and a higher level of gamma globin than unmodified cells.

[0714] In embodiments, sickle beta globin is produced at a level at least about 20%, at least about 30%, at least about 40% or at least about 50% lower than unmodified cells. In embodiments, gamma globin is produced at a level at least about 20%, at least about 30%, at least about 40%, at least about 50%, at least about 60% or at least about 70% higher than unmodified cells.

[0715] In an aspect, the invention provides a population of modified HSPCs or erythroid cells differentiated from said HSPCs (e.g., differentiated ex vivo or in a patient), e.g., as described herein, wherein at least 15%, at least 20%, at least 25%, at least 30%, at least 35%, at least 40%, at least 45%, at least 50%, at least 55%, at least 60%, at least 65%, at least 70%, at least 75%, at least 80%, at least 85%, at least 90%, or at least 95% of the cells are F cells. In embodiments, the population of cells contains (or is capable of differentiating, e.g., in vivo, into a population of erythrocytes that contains) a higher percent of F cells than a similar population of cells which have not had a gRNA molecule or gRNA molecules, e.g., as described herein, introduced into said cells. In embodiments, the population of cells has (or is capable of differentiating, e.g., in vivo, into a population of erythrocytes that has) at least a 20% increase, e.g, at least 21% increase, at least 22% increase, at least 23% increase, at least 24% increase, at least 25% increase, at least 26% increase, at least 27% increase, at least 28% increase, or at least 29% increase, in F cells relative to the similar population of cells which have not had a gRNA molecule or gRNA molecules, e.g., as described herein, introduced into said cells. In embodiments, the population of cells has (or is capable of differentiating, e.g., in vivo, into a population of erythrocytes that has) at least a 30% increase, e.g., at least a 35% increase, at least a 40% increase, at least a 45% increase, at least a 50% increase, at least a 55% increase, at least a 60% increase, at least a 65% increase, at least a 70% increase, at least a 75% increase, at least a 80% increase, at least a 85% increase, at least a 90% increase or at least a 95% increase, in F cells relative to the similar population of cells which have not had a gRNA molecule or gRNA molecules, e.g., as described herein, introduced into said cells. In embodiments, the population of cells has (or is capable of differentiating, e.g., in vivo, into a population of erythrocytes that has) at a 10-90%, a 20%-80%, a 20%-70%, a 20%-60%, a 20%-50%, a 20%-40%, a 20%-30%, a 25%-80%, a 25%-70%, a 25%-60%, a 25%-50%, a 25%-40%, a 25%-35%, a 25%-30%, a 30%-80%, a 30%-70%, a 30%-60%, a 30%-50%, a 30%-40%, or a 30%-35% increase in F cells relative to the similar population of cells which have not had a gRNA molecule or gRNA molecules, e.g., as described herein, introduced into said cells.In embodiments, the population of cells, e.g., as produced by a method described herein, comprises a sufficient number or cells and/or a sufficient increase in % F cells to treat a hemoglobinopathy, e.g., as described herein, e.g., sickle cell disease and/or beta thalassemia, in a patient in need thereof when introduced into said patient, e.g., in a therapeutically effective amount. In embodiments, the increase in F cells is as measured in an erythroid differentiation assay, e.g., as described herein.

[0716] In embodiments, including in any of the embodiments and aspects described herein, the invention relates to a cell, e.g., a population of cells, e.g., as modified by any of the gRNA, methods and/or CRISPR systems described herein, comprising F cells that produce at least 6 picograms fetal hemoglobin per cell. In embodiments, the F cells produce at least 7 picograms fetal hemoglobin per cell. In embodiments, the F cells produce at least 8 picograms fetal hemoglobin per cell. In embodiments, the F cells produce at least 9 picograms fetal hemoglobin per cell. In embodiments, the F cells produce at least 10 picograms fetal hemoglobin per cell. In embodiments, the F cells produce an average of between 6.0 and 7.0 picograms, between 7.0 and 8.0, between 8.0 and 9.0, between 9.0 and 10.0, between 10.0 and 11.0, or between 11.0 and 12.0 picograms of fetal hemoglobin per cell.

[0717] In embodiments, a cell or population of cells, e.g., as described herein (for example, comprising an indel) (or its progeny), is detectable in the cells of a subject to which it is introduced, for example, remains detectible by detecting the indel, for example, using a method described herein. In embodiments, the cell or population of cells (or its progeny) is detectible in a subject to which it is introduced for at least 10 weeks, at least 14 weeks, at least 16 weeks, at least 18 weeks, at least 20 weeks, at least 30 weeks at least 40 weeks, at least 50 weeks, or longer after said cell or population of cells is introduced into said subject.

[0718] In embodiments, one or more indels is detectable in the cells (e.g., the cells, e.g., CD34+ cells, of the bone marrow and/or peripheral blood) of a subject to which the cells or population of cells described herein have been introduced, for example, remains detectible by a method described herein, e.g., NGS. In embodiments, the one or more indels is detectible in the cells (e.g., the cells, e.g., CD34+ cells, of the bone marrow and/or peripheral blood) of a subject to which the cells or population of cells described herein have been introduced for at least 10 weeks, at least 14 weeks, at least 16 weeks, at least 18 weeks, at least 20 weeks, at least 30 weeks at least 40 weeks, at least 50 weeks, or longer after the cell or population of cells described herein is introduced into said subject. In embodiments, the level of detection of said one or more indels does not decrease over time, or decreases by less than 5%, less than 10%, less than 15%, less than 20%, less than 30%, less than 40% or less than 50% (for example relative to the level of indel detection pre-transplant or relative to the level of detection at week 2 post-transplant or at week 8 post transplant), for example when measured at week 20 post-transplant relative to the level of detection (e.g., precentage of cells comprising the one or more indels) measured pre-transplant or measured at week 2 post transplant or at week 8 post transplant.

[0719] In embodiments, including in any of the aforementioned embodiments, the cell and/or population of cells of the invention includes, e.g., consists of, cells which do not comprise nucleic acid encoding a Cas9 molecule.

### XVI. Additional WIZ Inhibitors and Methods of Use Thereof

[0720] As described above, a “WIZ inhibitor” refers to a substance that results in a detectably lower expression of WIZ gene or WIZ protein or lower activity level of WIZ proteins as compared to those levels without such substance. In some embodiments, a WIZ inhibitor is a small molecule compound (e.g., a small molecule compound that can target WIZ for degradation, also known as “WIZ degrader”). In some embodiments, a WIZ inhibitor is an anti-WIZ shRNA. In some embodiments, a WIZ inhibitor is an anti-WIZ siRNA. In some embodiments, a WIZ inhibitor is an anti-WIZ ASO. In some embodiments, a WIZ inhibitor is an anti-WIZ AMO. In some embodiments, a WIZ inhibitor is an anti-WIZ antisense nucleic acid. In some embodiments, a WIZ inhibitor is a composition or a cell or a population of cells (that comprises gRNA molecules described herein) described herein.

[0721] Also provided herein are compositions that can reduce WIZ gene expression or WIZ protein activity. Such compositions include, but are not limited to, small molecule compounds (e.g., small molecule compounds that can target WIZ protein for degradation, e.g., through E3 ubiquitin pathway, also known as “WIZ degraders”), siRNAs, shRNA, ASOs, miRNAs, AMOs.Exemplary shRNAs include those presented in Table 7.

TABLE 7

| Name | Sequence | SEQ ID NO |
|---|---|---|
| shWIZ_#1 | AGCCCACAATGCCACGGAAAT | 3196 |
| shWIZ_#2 | GCAACATCTACACCCTCAAAT | 3197 |
| shWIZ_#4 | TGACCGAGTGGTACGTCAATG | 3198 |
| shWIZ_#5 | AGCGGCAGAACATCAACAAAT | 3199 |

[0722] One surprising finding by the inventors of the inventions described herein is the linkage between WIZ gene expression/protein activity and the hemoglobin F (HbF) production. As demonstrated in the examples and figures, knocking down or knocking out WIZ gene in cells significantly increased HbF induction in those cells.

[0723] Also provided herein are methods for treating a hemoglobinopathy and by administering to a patient a cell or population of cells or a compositioin containing such cell or population of cells described herein, or a composition that reduces WIZ gene expression and/or WIZ protein activity. In aspects, the composition that reduces WIZ gene expression and/or WIZ protein activity comprises a small molecule compound (e.g., a WIZ degrader), siRNA, shRNA, antisense oligonucleotide (ASO), miRNA, anti-microRNA oligonucleotide (AMO) or any combination thereof. In aspects, the hemoglobinopathy is beta-thalassemia or sickle cell disease.

[0724] Also provided herein are methods for increasing fetal hemoglobin expression in a mammal by administering to a patient a cell or population of cells or a compositioin containing such cell or population of cells described herein, or a composition that reduces WIZ gene expression and/or WIZ protein activity. In aspects, the composition that reduces WIZ gene expression and/or WIZ protein activity comprises a small molecule compound (e.g., a WIZ degrader), siRNA, shRNA, antisense oligonucleotide (ASO), miRNA, anti-microRNA oligonucleotide (AMO) or any combination thereof.

[0725] Accordingly, also provided herein are methods for treating a hemoglobinopathy by adminstering a composition comprising a WIZ inhibitor as described herein to a patient. In some embodiments, a WIZ inhibitor is a small molecule compound that can target WIZ for degradation. In some embodiments, a WIZ inhibitor is an anti-WIZ shRNA. In some embodiments, a WIZ inhibitor is an anti-WIZ siRNA. In some embodiments, a WIZ inhibitor is an anti-WIZ ASO. In some embodiments, a WIZ inhibitor is an anti-WIZ miRNA. In some embodiments, a WIZ inhibitor is an anti-WIZ AMO (anti-miRNA oligonucleotides). In some embodiments, a WIZ inhibitor is a composition or a cell or a population of cells (that comprises gRNA molecules described herein) described herein.

[0726] Also provided herein are methods for increasing fetal hemoglobin expression in a mammal by adminstering a composition comprising a WIZ inhibitor as described herein to the mammal. In some embodiments, a WIZ inhibitor is a small molecule compound that can target WIZ for degradation. In some embodiments, a WIZ inhibitor is an anti-WIZ shRNA. In some embodiments, a WIZ inhibitor is an anti-WIZ siRNA. In some embodiments, a WIZ inhibitor is an anti-WIZ ASO. In some embodiments, a WIZ inhibitor is a composition or a cell or a population of cells (that comprises gRNA molecules described herein) described herein.

### XVII - WIZ Degraders

[0727] As used herein “degrader”, means, for example, a compound of the disclosure, that effectively decreases, or reduces the levels of a specific protein (e.g., WIZ) or degrades a specific protein (e.g., WIZ). The amount of a specific protein (e.g., WIZ) degraded can be measured by comparing the amount of the specific protein (e.g., WIZ) remaining after treatment with a compound of the disclosure as compared to the initial amount or level of the specific protein (e.g., WIZ) present as measured prior to treatment with a compound of the disclosure.

[0728] As used herein “selective degrader” or “selective compound” means, for example, a compound of the disclosure, that effectively decreases, or reduces the levels of a specific protein (e.g., WIZ) or degrades a specific protein (e.g., WIZ) to a greater extent than any other protein. A “selective degrader” or “selective compound” can be identified, for example, by comparing the ability of a compound to decrease or reduce the levels of or to degrade a specific protein (e.g., WIZ) to its ability to decrease or reduce the levels of or to degrade other proteins. In some embodiments, the selectivity can be identified by measuring the EC₅₀ or IC₅₀ of the compounds. Degradation may be achieved through mediation of an E3 ligase, e.g., E3-ligase complexes comprising the protein Cereblon.

[0729] In one embodiment, the specific protein degraded is WIZ protein. In an embodiment, at least about 30% of WIZ is degraded compared to initial levels. In an embodiment, at least about 40% of WIZ is degraded compared to initial levels. In an embodiment, at least about 50% of WIZ is degraded compared to initial levels. In an embodiment, at least about 60% of WIZ is degraded compared to initial levels. In an embodiment, at least about 70% of WIZ is degraded compared to initial levels. In an embodiment, at least about 75% of WIZ is degraded compared to initial levels. In an embodiment, at least about 80% of WIZ is degraded compared to initial levels. In an embodiment, at least about 85% of WIZ is degraded compared to initial levels. In an embodiment, at least about 90% of WIZ is degraded compared to initial levels. In an embodiment, at least about 95% of WIZ is degraded compared to initial levels. In an embodiment, over 95% of WIZ is degraded compared to initial levels. In an embodiment, at least about 99% of WIZ is degraded compared to initial levels.

[0730] In an embodiment, the WIZ protein is degraded in an amount of from about 30% to about 99% compared to initial levels. In an embodiment, the WIZ protein is degraded in an amount of from about 40% to about 99% compared to initial levels. In an embodiment, the WIZ protein is degraded in an amount of from about 50% to about 99% compared to initial levels. In an embodiment, the WIZ protein is degraded in an amount of from about 60% to about 99% compared to initial levels. In an embodiment, the WIZ protein is degraded in an amount of from about 70% to about 99% compared to initial levels. In an embodiment, the WIZ protein is degraded in an amount of from about 80% to about 99% compared to initial levels. In an embodiment, the WIZ protein is degraded in an amount of from about 90% to about 99% compared to initial levels. In an embodiment, the WIZ protein is degraded in an amount of from about 95% to about 99% compared to initial levels. In an embodiment, the WIZ protein is degraded in an amount of from about 90% to about 95% compared to initial levels.

[0731] As used herein, the terms “inducing fetal hemoglobin”, “fetal hemoglobin induction”, or “increasing fetal hemoglobin expression” refer to increasing the percentage of HbF in the blood of a subject. In an embodiment, the amount of total HbF in the blood of the subject increases. In an embodiment, the amount of total hemoglobin in the blood of the subject increases. In an embodiment, the amount of HbF is increased by at least about 10%, or at least about 20%, or at least about 30%, or at least about 40%, or at least about 50%, or at least about 60%, or at least about 70%, or at least about 80%, or at least about 90%, or at least about 100%, or more than 100%, for example, at least about 2-fold, or at least about 3-fold, or at least about 4-fold, or at least about 5-fold, or at least about 6-fold, or at least about 7-fold, or at least about 8-fold, or at least about 9-fold, or at least about 10-fold, or more than 10-fold as compared to either in the absence of a compound disclosed herein.

[0732] In an embodiment, the total hemoglobin in the blood, e.g., the blood in a subject, is increased by at least about 10%, or at least about 20%, or at least about 30%, or at least about 40%, or at least about 50%, or at least about 60%, or at least about 70%, or at least about 80%, or at least about 90%, or at least about 100%, or more than 100%, for example, at least about 2-fold, or at least about 3-fold, or at least about 4-fold, or at least about 5-fold, or at least about 6-fold, or at least about 7-fold, or at least about 8-fold, or at least about 9-fold, or at least about 10-fold, or more than 10-fold as compared to either in the absence of a compound disclosed herein.

[0733] In an embodiment, the WIZ degrader is a 3-(5-methoxy-l-oxoisoindolin-2-yl)piperidine-2,6-dione compound or a pharmaceutically acceptable salt thereof, or a composition thereof. In a further embodiment, the WIZ degrader is a compound of formula (I), or a pharmaceutically acceptable salt hydrate, solvate, prodrug, stereoisomer, or tautomer thereof, or a composition thereof.

[chemical structure]

wherein:
[0734] Y is selected from O, CH₂, and CF₂;
[0735] z is an integer from 0 to 2;
[0736] R^{X1} and R^{X2} are each independently selected from hydrogen and C₁-C₆alkyl;
[0737] R^{Y1} and R^{Y2} are each independently selected from hydrogen and C₁-C₆alkyl;
[0738] R¹ is selected from hydrogen and C₁-C₆alkyl;
[0739] R² is selected from hydrogen, —C(═O)—R³, C₃-C₈cycloalkyl, C₁-C₆haloalkyl, and C₁-C₁₀alkyl, wherein the alkyl is substituted with 0-1 substituent independently selected from C₆-C₁₀aryl, 5- to 10-membered heteroaryl comprising 1-4 heteroatoms independently selected from N, O, and S, 4- to 6-membered heterocyclyl comprising 1-2 heteroatoms independently selected from N, O, and S, and C₃-Cscycloalkyl,
[0740] wherein the aryl, heteroaryl, heterocyclyl, and cycloalkyl are each independently substituted with 0-5 R⁴;
[0741] R³ is selected from -CH=CR^{3a}R^{3b}, C₆-C₁₀aryl, 5- to 10-membered heteroaryl comprising 1-4 heteroatoms independently selected from N, O, and S, 4- to 6-membered heterocyclyl comprising 1-2 heteroatoms independently selected from N, O, and S, C₃-C₈cycloalkyl, and C₁-C₆alkyl, wherein the alkyl is substituted with 0-3 R^{3c}, and
[0742] wherein the aryl, heteroaryl, heterocyclyl, and cycloalkyl are each independently substituted with 0-5 R⁴;
[0743] R^{3a} and R^{3b} together with the carbon atom to which they are attached form a C₃-C₈cycloalkyl ring;
[0744] each R^{3c} is at each occurrence independently selected from —C(═O)—R^{3d}, NR^{3e}R^{3f}, C₁-C₆alkoxyl, -O-R^{3d}, hydroxyl, —O—C₆-C₁₀aryl, C₁-C₆arylC₆-C₁₀alkyl—O—, 5- to 10-membered -0-heteroaryl comprising 1-4 heteroatoms independently selected from N, O, and S, C₆-C₁₀aryl, 5- to 10-membered heteroaryl comprising 1-4 heteroatoms independently selected from N, O, and S, 4- to 6-membered heterocyclyl comprising 1-2 heteroatoms independently selected from N, O, and S, and C₃-Cscycloalkyl,
[0745] wherein the -0-aryl, arylalkyl—O—, and -0-heteroaryl are each independently substituted with 0-3 R^{4a}, and
[0746] wherein the aryl, heteroaryl, heterocyclyl, and cycloalkyl are each independently substituted with 0-5 R⁴;
[0747] R^{3d} is a 4- to 6-membered heterocyclyl comprising 1-2 heteroatoms independently selected from N, O, and S;
[0748] R^{3e} and R^{3f} are each independently selected from hydrogen and C₁-C₆alkyl;
[0749] each R⁴ is at each occurrence independently selected from C₆-C₁₀aryl, —O—C₆-C₁₀aryl, C₁-C₆arylC₆-C₁₀alkyl—O—, 5- to 10-membered —O—heteroaryl comprising 1-4 heteroatoms independently selected from N, O, and S, 5- to 10-membered heteroaryl comprising 1-4 heteroatoms independently selected from N, O, and S, 4- to 6-membered heterocyclyl comprising 1-2 heteroatoms independently selected from N, O, and S, C₁-C₁₀alkyl, C₁-C₆alkoxyl, C₁-C₆haloalkyl, -SO₂R^{4c}, halogen, hydroxyl, —CN, —O—4- to 6-membered heterocyclyl comprising 1-2 heteroatoms independently selected from N, O, and S, oxo, C₁-C₆haloalkoxyl, —C(═O)—O—(R⁵), —C(═O)—(R⁵), —C(═O)—NR^{6a}R^{6b}, NR^{6a}R^{6b}, NH—C(═O)—O—(C₁-C₆alkyl), and C₃-C₈cycloalkyl, wherein the aryl, -0-aryl, arylalkyl—O—, —O—heteroaryl, heteroaryl, and heterocyclyl are each independently substituted with 0-3 R^{4a},
[0750] wherein the alkyl and alkoxyl are each independently substituted with 0-1 R^{4b}, and
[0751] wherein the cycloalkyl is substituted with 0-3 substituents each independently selected from —CN, C₁-C₆alkyl, C₁-C₆alkoxyl, and hydroxyl;
[0752] R^{4a} is at each occurrence independently selected from —CN, C₁-C₆alkoxyl, C₁-C₆haloalkyl, halogen, hydroxyl, —C(═O)—O—(R⁵), 5- to 10-membered heteroaryl comprising 1-4 heteroatoms independently selected from N, O, and S, di(C₁-C₆alkyl)aminoC₁-C₆alkyl, and C₁-C₆alkyl, wherein the alkyl is substituted with 0-1 R^{4b}, and wherein the heteroaryl is substituted with 0-3 R^{4a-1};
[0753] R^{4a-1} is at each occurrence independently selected from C₁-C₆alkyl, di(C₁-C₆alkyl)aminoC₁-C₆alkyl, —CN, C₁-C₆alkoxyl, and C₁-C₆haloalkyl;
[0754] R^{4b} is at each occurrence independently selected from —CN, —C(═O)NR^{6a}R^{6b}, NR^{6a}R^{6b}, 5- to 10-membered heteroaryl comprising 1-4 heteroatoms independently selected from N, O, and S, —C(═O)—OH, C₁-C₆alkoxyl, 4- to 6-membered heterocyclyl comprising 1 or 2 heteroatoms independently selected from N, O, and S, C₃-C₈cycloalkyl, C₂-C₄alkynyl, and C₆-C₁₀aryl, wherein the aryl is substituted with 0-1 substituent each independently selected from —CN, C₁-C₆haloalkyl, and C₁-C₆alkyl;
[0755] R^{4c} is selected from C₆-C₁₀aryl, hydroxyl, NH₂, and halogen;
[0756] R⁵ is selected from C₁-C₆alkyl, C₆-C₁₀aryl, and C₆-C₁₀arylC₁-C₆alkyl;
[0757] R^{6a} and R^{6b} are each independently selected from hydrogen and C₁-C₆alkyl;
[0758] or R^{6a} and R^{6b} together with the nitrogen atom to which they are attached form a 5- or 6-membered heterocyclyl comprising 0-1 additional heteroatoms selected from N, O, and S, wherein the heterocyclyl is substituted with 0-2 R^{6c};
[0759] R^{6c} is at each occurrence independently selected from C₆-C₁₀arylC₁-C₆alkyl, —C(═O)—O—(C₁-C₆alkyl), —C(═O)—(C₁-C₆alkyl), oxo, and C₁-C₆alkyl, wherein the alkyl is substituted with 0-1 substituent independently selected from —CN and 4- to 6-membered heterocyclyl comprising 1-2 heteroatoms independently selected from N, O, and S.

### Methods of Making

[0760] The compounds of the disclosure can be prepared in a number of ways well known to those skilled in the art of organic synthesis. By way of example, compounds of the present disclosure can be synthesized using the methods described below, together with synthetic methods known in the art of synthetic organic chemistry, or variations thereon as appreciated by those skilled in the art.

[0761] Generally, the compounds of formula (I) can be prepared according to the Schemes provided infra.

[chemical structure]

[0762] The starting materials for the above reaction scheme are commercially available or can be prepared according to methods known to one skilled in the art or by methods disclosed herein. In general, the compounds of the disclosure are prepared in the above reaction Scheme 1 as follows:

[0763] A metallaphotoredox reaction, such as an iridium (Ir)-catalysed photoredox coupling of INT-1 with an alcohol partner of formula INT-1A in the presence of a polar solvent, such as acetonitrile (ACN) can provide the cross-coupled ether product INT-2 in Step 1. Removal of the protecting group (e.g., Boc) under acidic conditions can provide the free amine (1)-1 (Step 2), which can then be converted to (I)-2 via a reductive amination (Step 3-i) with an appropriate aldehyde in the presence of a borohydride reagent, such as sodium borohydride acetate, or an alkylation reaction (Step 3-ii) with an appropriate alkyl mesylate in the presence of an amine base and polar solvent, such as diisopropylethylamine (DIPEA) and dimethylformamide (DMF). Where compounds of formula (I)-2 contain a N-protected moiety, e.g., N-protected piperazine group, these can further be converted to (I)-3 in Step 4 by deprotection (e.g., Boc) under acidic conditions, and subsequent reductive amination with an appropriate aldehyde and sodium borohydride reagent, or alkylation reaction with an appropriate alkylating reagent, or amide coupling with an appropriate activating agent and a base to provide a compound of formula (I)-4. For Scheme 1, R², R^{6a}, R^{6b} and R^{6c} are as defined herein.

[chemical structure]

[0764] The starting materials for the above reaction scheme are commercially available or can be prepared according to methods known to one skilled in the art or by methods disclosed herein. In general, the compounds of the disclosure are prepared in the above reaction Scheme 2 as follows: The compound of formula (1)-1 can be converted into (I)-5 via a reductive amination (Step 3-i) with an appropriate ketone in the presence of a borohydride reagent, such as sodium borohydride acetate or (I)-6 via an alkylation reaction with an appropriate alkyl iodide in the presence of a base, such as K₂CO₃, and a polar solvent, such as dimethylacetamide (DMA). For Scheme 2 R² is as defined herein.

[chemical structure]

[0765] The starting materials for the above reaction scheme are commercially available or can be prepared according to methods known to one skilled in the art or by methods disclosed herein. In general, the compounds of the disclosure are prepared in the above reaction Scheme 3 as follows: An amide coupling reaction of the compound (I)-1 with an appropriate carboxylic acid, an activating agent, such as HATU, and a base such as DIPEA or NMM, affords the amide product (1)-7. For Scheme 3 R³ is as defined herein.

[chemical structure]

[0766] The starting materials for the above reaction scheme are commercially available or can be prepared according to methods known to one skilled in the art or by methods disclosed herein. In general, the compounds of the disclosure are prepared in the above reaction Scheme 4 as follows:

[0767] A metallaphotoredox reaction, such as an iridium (Ir)-catalysed photoredox coupling, of (INT-3) with an alcohol partner of formula (INT-1B) in the presence of a polar solvent, such as acetonitrile (ACN) can provide the cross-coupled ether product (4)-I in Step 1. Removal of the protecting group (e.g., Boc) under acidic conditions, can provide the free amine (4)-II (Step 2), which can then be converted to (4)-III via reductive amination (Step 3-i) with an appropriate aldehyde in the presence of a borohydride reagent, such as sodium borohydride acetate. Alternatively, (4)-II may be converted into 4-(III) via an alkylation reaction (Step 3-ii) with an appropriate alkyl mesylate or alkyl halide in the presence of an amine base and polar solvent, such as diisopropylethylamine (DIPEA) and dimethylformamide (DMF) as described in general schemes 1and 2. Alternatively, (4)-II may be converted into 4-(III) via an amide coupling reaction (Step 3-iii) with an appropriate carboxylic acid, an activating agent, such as HATU, and a base, such as DIPEA or NMM in a polar solvent, such as DMF, as described in general schemes 1 and 3. Chlorination with a suitable agent, such as SOC1₂ and ring opening of lactone (4)-III affords (4)-IV. Subsequent ring closing by amidation and nucleophilic substitution using INT-IC under acidic conditions yields final product of Formula (I). For Scheme 4, Y, z, R^{x1}, R^{x2}, R^{y1}, R^{y2}, R¹ and R² are as defined herein.

### Preparation of Compounds

[0768] It is understood that in the following description, combinations of substituents and/or variables of the depicted formulae are permissible only if such combinations result in stable compounds.

[0769] It will also be appreciated by those skilled in the art that in the processes described below, the functional groups of intermediate compounds may need to be protected by suitable protecting groups. Such functional groups include hydroxy, phenol, amino and carboxylic acid. Suitable protecting groups for hydroxy or phenol include trialkylsilyl or diarylalkylsilyl (e.g., t-butyldimethylsilyl, t-butyldiphenylsilyl or trimethylsilyl), tetrahydropyranyl, benzyl, substituted benzyl, methyl, and the like. Suitable protecting groups for amino, amidino and guanidino include t-butoxycarbonyl, benzyloxycarbonyl, and the like. Suitable protecting groups for carboxylic acid include alkyl, aryl or arylalkyl esters.

[0770] Protecting groups may be added or removed in accordance with standard techniques, which are well-known to those skilled in the art and as described herein. The use of protecting groups is described in detail in J. F. W. McOmie, “Protective Groups in Organic Chemistry”, Plenum Press, London and New York 1973; T. W. Greene and P. G. M. Wuts, “Greene’s Protective Groups in Organic Synthesis”, Fourth Edition, Wiley, New York 2007; P. J. Kocienski, “Protecting Groups”, Third Edition, Georg Thieme Verlag, Stuttgart and New York 2005; and in “Methoden der organischen Chemie” (Methods of Organic Chemistry), Houben Weyl, 4th edition, Volume 15/I, Georg Thieme Verlag, Stuttgart 1974.

[0771] The protecting group may also be a polymer resin, such as a Wang resin or a 2-chlorotrityl-chloride resin.

[0772] The following reaction schemes illustrate methods to make compounds of this disclosure. It is understood that one skilled in the art would be able to make these compounds by similar methods or by methods known to one skilled in the art. In general, starting components and reagents may be obtained from sources such as Sigma Aldrich, Lancaster Synthesis, Inc., Maybridge, Matrix Scientific, TCI, and Fluorochem USA, Strem, other commercial vendors, or synthesized according to sources known to those skilled in the art, or prepared as described in this disclosure.

### Analytical Methods, Materials, and Instrumentation

[0773] Unless otherwise noted, reagents and solvents were used as received from commercial suppliers. Proton nuclear magnetic resonance (NMR) spectra were obtained on either Bruker Avance spectrometer or Varian Oxford 400 MHz spectrometer unless otherwise noted. Spectra are given in ppm (δ) and coupling constants, J, are reported in Hertz. Tetramethylsilane (TMS) was used as an internal standard. Chemical shifts are reported in ppm relative to dimethyl sulfoxide (δ 2.50), methanol (δ 3.31), chloroform (δ 7.26) or other solvent as indicated in NMR spectral data. A small amount of the dry sample (2-5 mg) is dissolved in an appropriate deuterated solvent (1 mL). The chemical names were generated using ChemBioDraw Ultra v12 from Cambridge Soft.

[0774] Mass spectra (ESI-MS) were collected using a Waters System (Acquity UPLC and a Micromass ZQ mass spectrometer) or Agilent-1260 Infinity (6120 Quadrupole); all masses reported are the m/z of the protonated parent ions unless recorded otherwise. The sample was dissolved in a suitable solvent such as MeCN, DMSO, or MeOH and was injected directly into the column using an automated sample handler. The analysis is performed on Waters Acquity UPLC system (Column: Waters Acquity UPLC BEH C18 1.7 µm, 2.1 x 30 mm; Flow rate: 1 mL/min; 55° C. (column temperature); Solvent A: 0.05% formic acid in water, Solvent B: 0.04% formic acid in MeOH; gradient 95% Solvent A from 0 to 0.10 min; 95% Solvent A to 20% Solvent A from 0.10 to 0.50 min; 20% Solvent A to 5% Solvent A from 0.50 to 0.60 min; hold at 5% Solvent A from 0.6 min to 0.8 min; 5% Solvent A to 95% Solvent A from 0.80 to 0.90 min; and hold 95% Solvent A from 0.90 to 1.15 min.

### INCORPORATION BY REFERENCE

[0775] All publications, patents, and patent applications mentioned herein are hereby incorporated by reference in their entirety as if each individual publication, patent or patent application was specifically and individually indicated to be incorporated by reference. In case of conflict, the present application, including any definitions herein, will control.

### EQUIVALENTS

[0776] Those skilled in the art will recognize, or be able to ascertain using no more than routine experimentation, many equivalents to the specific embodiments of the invention described herein. While this invention has been disclosed with reference to specific aspects, it is apparent that other aspects and variations of this invention may be devised by others skilled in the art without departing from the true spirit and scope of the invention. The appended claims are intended to be construed to include all such aspects and equivalent variations.

### EXAMPLES

### Example 1 - Exemplary General Methods

### Guide Selection and Design

[0777] Initial guide selection was performed in silico using a human reference genome and user defined genomic regions of interest (e.g., a gene, an exon of a gene, non-coding regulatory region, etc), for identifying PAMs in the regions of interest. For each identified PAM, analyses were performed and statistics reported. gRNA molecules were further selected and rank-ordered based on a number of methods for determining efficiency and efficacy, e.g., as described herein. This example provides the experimental details for procedures that can be used to assay the CRISPR systems, gRNAs and other apsects of the invention described herein. Any modifications to these general procedures that were employed in a particular experiment are noted in that example.

### Next-Generation Sequencing (NGS) and Analysis for On-Target Cleavage Efficiency and Indel Formation

[0778] To determine the efficiency of editing (e.g., cleaving) the target location in the genome, deep sequencing is utilized to identify the presence of insertions and deletions introduced by non-homologous end joining.

[0779] In summary PCR primers are designed around the target site, and the genomic area of interest are PCR amplified in edited and unedited samples. Resulting amplicons are converted into Illumina sequencing libraries and sequenced. Sequencing reads are aligned to the human genome reference and subjected to variant calling analysis allowing us to the determine sequence variants and their frequency at the target region of interest. Data are subjected to various quality filters and known variants or variants identified only in the unedited samples were excluded. The editing percentage is defined as the percentage of all insertions or deletions events occurring at the on-target site of interest (i.e. insertion and deletion reads at the on-target site over the total number of reads (wild type and mutant reads) at on-target site.

### RNP Generation

[0780] The addition of crRNA and tracrRNA to Cas9 protein results in the formation of the active Cas9 ribonucleoprotein complex (RNP), which mediates binding to the target region specified by the crRNA and specific cleavage of the targeted genomic DNA. This complex is formed by loading tracrRNA and crRNA into Cas9, which is believed to cause conformational changes to Cas9 allowing it to bind and cleave dsDNA.

[0781] The crRNA and tracrRNA are separately denatured at 95° C. for 2 minutes, and allowed to come to room temperature. Cas9 protein (10 mg/ml) was added to 5X CCE buffer (20mM HEPES, 100 mM KCl, 5 mM MgCl₂, 1 mM DTT, 5% glycerol), to which tracrRNA and the various crRNAs are then added (in separate reactions) and incubated at 37° C. for 10 minutes, thereby forming the active RNP complex.

[0782] The complex is delivered by electroportation and other methods into a wide variety of cells, including HEK-293 and CD34+ hematopoietic cells.

### Delivery of RNPs to CD34+ HSCs

[0783] Cas9 RNPs were delivered into CD34+ HSCs.

[0784] CD34+ HSCs are thawed and cultured (at ~500,000 cells/ml) overnight in StemSpan SFEM (StemCell Technologies) media with IL6, SCF, TPO, Flt3L and Pen/Strep added. Roughly 90,000 cells were aliquoted and pelleted per each RNP delivery reaction. The cells are then resuspended in 60 ul P3 nucleofection buffer (Lonza), to which active RNP was subsequently added. The HSCs are then electroporated (e.g., nucleofected using program CA-137 on a Lonza Nucleofector) in triplicate (20 uL/electroporation). Immediately following electroporation, StemSpan SFEM media (with IL12, SCF, TPO, Flt3L and Pen/Strep) is added to the HSCs, which is cultured for at least 24 hours. HSCs are then harvested and subjected to T7E1, NGS, and/or surface marker expression analyses.

### HSC Functional Assay

[0785] CD34+ HSCs may be assayed for stem cell phenotype using known techniques such as flow cytometry or the in vitro colony forming assay. By way of example, cells are assayed by the in vitro colony forming assay (CFC) using the Methocult H4034 Optimum kit (StemCell Technologies) using the manufacturer’s protocol. Briefly, 500-2000 CD34+ cells in <=100 ul volume are added to 1-1.25 ml methocult. The mixture is vortexed vigorously for 4-5 seconds to mix thoroughly, then allowed to rest at room temperature for at least 5 minutes. Using a syringe, 1-1.25 ml of MethoCult + cells is transferred to a 35 mm dish or well of a 6-well plate. Colony number and morphology is assessed after 12-14 days as per the manufacturer’s protocol.

### In Vivo Xeno-Transplantation

[0786] HSCs are functionally defined by their ability to self-renew and for multi-lineage differentiation. This functionality can only be assessed in vivo. The gold-standard for determining human HSC function is through xeno-transplantation into the NOD-SCID gamma mouse (NSG) that through a series of mutations is severely immunocompromised and thus can act as a recipient for human cells. HSCs following editing were transplanted into NSG mice to validate that the induced edit does not impact HSC function. Periodic peripheral blood analysis is used to assess human chimerism and lineage development and secondary transplantation following 20 weeks is used to establish the presence of functional HSCs, as described more fully in these examples.

### Example 2 - Loss of WIZ Induces Fetal Hemoglobin Expression in mPB CD34+ Derived Erythroid Cells

### Materials and Methods

### Cell Culture

[0787] HEK293T cells were maintained in DMEM high glucose complete media with sodium pyrovate, nonessential amino acids, 10% FBS, 1x L-glutamine (2 mM), 1% pen/strep (100 U/ml), 1x HEPES (25 mM). Unless disclosed otherwise, all reagents for culturing HEK293T cells were obtained from Invitrogen™.

[0788] Mobilized peripheral blood (mPB) CD34+ cells (AllCells, LLC) were maintained in StemSpan™ serum-free expansion media (SFEM) (STEMCELL Technologies Inc.) supplemented with 50 ng/mL each of rhTPO, rhIL-6, rhFLT3L, rhSCF for 2-3 days prior to shRNA transduction or targeted ribonucleoprotein (RNP) electroporation targeting WIZ. All cytokines were obtained from Peprotech®, Inc. Cell cultures were maintained at 37° C. and 5%CO₂ in a humidified tissue culture incubator.

### Generation of shRNA Lentiviral Clones Targeting WIZ

[0789] 5′-phosphorylated sense and anti-sense complementary single-stranded DNA oligos of the respective shRNA against WIZ were synthesized by Integrated DNA Technologies, Inc. (IDT). Each DNA oligonucleotide was designed with PmeI/AscI restriction overhangs on 5 - and 3 - ends, respectively, for subsequent compatible ligation into the lentiviral vector backbone. Equimolar of each of the complementary oligonucleotides were annealed in NEB Buffer 2 (New England Biolabs® Inc.) by heating on a heating block at 98° C. for 5 minutes followed by cooling to room temperature on the bench top. Annealed double-stranded DNA oligonucleotides were ligated into pHAGE lentiviral backbone digested with PmeI/AscI using T4 DNA ligase kit (New England Biolabs). Ligation reactions were transformed into chemically competent Stbl3 cells (Invitrogen™) according to the manufacturer’s protocol. Positive clones were verified using mU6 sequencing primer (5′-ctacattttacatgatagg-3′) (SEQ ID NO: 3206) and plasmids were purified by Alta Biotech LLC.

[0790] Lentivirus particles for the respective shRNA constructs were generated by co-transfection of HEK293T cells with pCMV-dR8.91 and pCMV-VSV-G expressing envelope plasmid using Lipofectamine 3000 reagent in 150 mm tissue culture dish format as per manufacturer’s instructions (Invitrogen™). Lentivirus supernatant was harvested 48 hours after co-transfection, filtered through a 0.45 µm filter (Millipore) and concentrated using Amicon Ultra 15 with Ultracel-100 membrane (Millipore). Infectious units of each of the lentivirus particle was determined by flow cytometry using eGFP expression as marker of transduction after serial dilution and infection of HEK293T cells.

### Lentiviral shRNA Transduction and FACS Sorting of mPB CD34+ Cells

[0791] mPB CD34+ transduction was performed on retronectin coated non-tissue culture treated 96 well-flat bottom plates (Corning, Inc.). Briefly, TC plates were coated with 100 µL of RetroNectin® (1 µg/mL) (TAKARABIO, Inc.), sealed and incubated at 4° C. overnight. RetroNectinⓇ was then removed and plates were incubated with BSA (bovine serum albumin) (1%) in PBS for 30 minutes at room temperature. Subsequently, BSA (bovine serum albumin) was aspirated and replaced with 100 µL of lentiviral concentrate and centrifuged at 2000 xg for 2 hours at room temperature. Next, residual supernatant was gently pipetted out and ready for transductions of mPB CD34+ cells. Ten thousand cells were plated in 150 µL of StemSpan™ Serum-free Expansion Medium (SFEM) supplemented with 50 ng/mL each of rhTPO, rhIL-6, rhFLT3L, rhSCF to initiate transduction. Cells were cultured for 72 hours prior to assessing transduction efficiencies using eGFP expression as a marker.

[0792] eGFP-positive cells were sorted on an FACSAria™ III (BD Biosciences). Briefly, the transduced mPB CD34+ cell population was washed and re-suspended with FACS buffer containing 1x Hank’s buffered saline solution, EDTA (1 mM) and FBS (2%). Sorted eGFP-positive cells were used for the erythroid differentiation assay.

### Targeting CRISPR Knockout of WIZ

[0793] Alt-R CRISPR-Cas9 crRNA and tracrRNA

(5′-AGCAUAGCAAGUUAAAAUAAGGCUAGUCCGUUAUCAACUUGAAAAA
GUGGCACCGAGUCGGUGCUUU-3’; SEQ ID NO: 3207)

were purchased from Integrated DNA Technologies, Inc.. Equimolar tracrRNA was annealed with WIZ targeting crRNA (Table 8) in Tris buffer (10 mM, pH 7.5) by heating at 95° C. for 5 minutes followed by cooling to room temperature using a polymerase chain reaction (PCR) machine (Bio-Rad). Subsequently, a ribonucleoprotein (RNP) complex was generated by mixing annealed tracrRNA:crRNA with 6 ug of Cas9 at 37° C. for 5 minutes in 1x buffer containing HEPES (100 mM), KCl (50 mM), MgCl₂ (2.5 mM), glycerol (0.03%), DTT (1 mM) and Tris pH 7.5 (2 mM).

[0794] Electroporation of the RNP complex was performed on a 4D-Nucleofector™ (Lonza) as per manufacturer’s recommendation. Briefly, 50,000 mPB CD34+ cells resuspended in Primary Cell P3 Buffer with supplement (Lonza) were pre-mixed with 5 µL of RNP complex per well in nucleocuvettes and incubated for 5 minutes at room temperature. Subsequently, the mixture was electroporated using the CM-137 program. Cells were cultured for 72 hours post-RNP electroporation before initiating erythroid differentiation.

TABLE 8

| Name | Sequence (5′ to 3′) | Target genomic region | Strand | SEQ ID NO |
|---|---|---|---|---|
| rg 0111 | ACGGAGGCTAAGCGTCGCAA | random guide, non-targeting | | 3108 |
| WIZ_6 | AACATCTTTCGGGCCGTAGG | chr19:15427143-15427163 | (+) | 3201 |
| WIZ_9 | GACATCCGCTGCGAGTTCTG | chr19:15427488-15427510 | (-) | 3107 |
| WIZ_12 | TGCAGCGTCCCGGGCAGAGC | chr19:15425751-15425773 | (-) | 3203 |
| WIZ_14 | CAAGCCGTGCCTCATCAAGA | chr19:15425571-15425593 | (-) | 3204 |
| WIZ_15 | CGGGCACACCTGCGGCAGTT | chr19:15424942-15424964 | (-) | 3202 |
| WIZ 18 | AGTGGGTGCGGCACTTACAG | chr19:15423169-15423191 | (-) | 3205 |

### Erythroid Differentiation of shRNA Transduced or RNP Electroporated mPB CD34+ Cells

[0795] Erythroid differentiation was initiated by plating 8,000 RNP-electroporated or FACS sorted eGFP+ mPB CD34+ cells per well in 96-well tissue culture plate. Base differentiation media consists of IMDM (Iscove’s Modified Dulbecco’s Medium), human AB serum (5%), transferrin (330 µg/mL), Insulin (10 µg/mL) and Heparin (2 IU/mL). Differentiation media was supplemented with rhSCF (100 ng/mL), rhIL-3 (10 ng/mL), rhEPO (2.5 U/mL) and hydrocortisone (1 µM). After 4 days of differentiation, the cells were split (1:4) in fresh media to maintain optimal growth density. Cells were cultured for additional 3 days and utilized for assessment of fetal hemoglobin (HbF) expression.

### Analysis of HbF Gene Expression by RNA-Seq

[0796] Two independent, targeted CRISPR/Cas9 knockout (KO) of WIZ was done using WIZ_6 and WIZ_18 gRNAs or a non-targeting scrambled gRNA negative control in mPB CD34+ HSCs. Cells from KO and negative control were then cultured for 7 days for erythroid differentiation and used for total RNA isolation (Zymo Research, catalogue# R1053). The quality of isolated RNA was determined before sequencing using Agilent RNA 6000 Pico Kit (Agilent, catalogue# 5067-1513).

[0797] RNA sequencing libraries were prepared using the Illumina TruSeq Stranded mRNA Sample Prep protocol and sequenced using the Illumina NovaSeq6000 platform (Illumina). Samples were sequenced to a length of 2x76 base-pairs. For each sample, salmon version 0.8.2 (Patro et al. 2017; doi: 10.1038/nmeth.4197) was used to map sequenced fragments to annotated transcripts in the human reference genome hg38 provided by the ENSEMBL database. Per-gene expression levels were obtained by summing the counts of transcript-level counts using tximport (Soneson et al. 2015; doi: 10.12688/f1000research.7563.1). DESeq2 was used to normalize for library size and transcript length differences, and to test for differential expression between samples treated with the gRNAs targeting WIZ and the samples treated with the scrambled gRNA controls (Love et al. 2014; doi: 10.1186/s13059-014-0550-8). Data were visualized using ggplot2 (Wickham H (2016). ggplot2: Elegant Graphics for Data Analysis. Springer-Verlag New York. ISBN 978-3-319-24277-4; https://ggplot2.tidyverse.org).

### HbF Intracellular Staining

[0798] One hundred thousand cells were aliquoted into U-bottom 96-well plate and stained for 20 min in the dark with diluted LIVE/DEAD fixable violet viability dye as per manufacturer’s recommendation (Invitrogen). Cells were washed with FACS staining buffer and subsequently stained with anti-CD71-BV711 (BD Biosciences) and anti-CD235a-APC (BD Biosciences) for 20 mins in the dark. After two rounds of washes with three volumes of 1x PBS, cells were fixed and permeabilized with 1X BD Cytofix/Cytoperm (BD Biosciences) for 30 minutes at room temperature in the dark. Subsequently, cells were washed twice with three volumes of 1x Perm/wash buffer (BD Biosciences). Anti-HbF-FITC (ThermoScientific) was diluted (1:25) in 1x perm/wash buffer, added to permeablized cells and incubated for 30 minutes at room temperature in the dark. Next, cells were washed twice with three volumes of 1x perm/wash buffer and analyzed by flow cytometry using LSR Fortessa (BD Biosciences). Data was analyzed with FlowJo software.

### Results

### WIZ KO Upregulates HBG1/2 Expression Upon Erythroid Differentiation

[0799] Targeted KO of WIZ using two independent gRNAs (WIZ 6 and WIZ_18) demonstrated upregulation of fetal hemoglobin genes (HBG1/2), as presented in FIG. 1A.

### WIZ Knockdown and KO Upregulate HbF Protein

[0800] In order to validate whether WIZ is a negative regulator of HbF expression, shRNA and CRISPR-Cas9-mediated knockdown and knockout functional genetics approaches were employed. mPB CD34+ cells were treated with shRNA or CRISPR-Cas9 reagents and erythroid differentiated for 7 days prior to flow cytometry analysis. Targeted knockdown of WIZ transcript results in 78-91% HbF+ cells compared to 40% for the negative control scrambled shRNA. Error bars represent standard error of two biological replicates with three technical replicates each (FIG. 1B). CRISPR/Cas9-mediated targeted loss of WIZ results in 62-88% HbF+ cells compared to 39% for random guide crRNA. Error bars represent standard error of one biological sample with four technical replicates (FIG. 1C). To summarize, modulation (e.g. inhibiting and/or degrading) of WIZ by shRNA knockdown (demonstrated using four different shRNA sequences) or CRISPR knockout (demonstrated using six different gRNA sequences) induces fetal hemoglobin expression in human primary erythroid cells. These data provide genetic evidence that WIZ is a regulator of fetal hemoglobin expression and represents a novel target for the treatment of sickle cell disease and beta-thalassemia.

[0801] To the extent there are any discrepancies between any sequence listing and any sequence recited in the specification, the sequence recited in the specification should be considered the correct sequence. Unless otherwise indicated, all genomic locations are according to hg38.

### Example 3 - WIZ Degraders

### Preparation of Compounds

### General Method I- Representative Procedure for Photoredox Catalysis with Lactone

[0802] A 40 mL vial was charged with 5-bromoisobenzofuran-1(3H)-one (5-1) (1 equiv), an alcohol building block (1 equiv), NiCl₂(glyme) (0.05 equiv), dtbbpy (0.05 equiv), and Ir[(dF(CF₃)ppy)₂dtbbpy]PF₆ (0.01 equiv). ACN (0.186 M) was then added, followed by 2,2,6,6-tetramethylpiperidine (1 equiv). The reaction flask was evacuated and backfilled with nitrogen three times. The resulting mixture was placed in MacMillian Blue LED light photoreactor for 18 hrs. The reaction mixture was then filtered and the solid was washed with dichloromethane. The filtrate was concentrated and purified by reverse phase HPLC or silica gel chromatography.

### General Method II- Representative Procedure for Boc Deprotection

[0803] Amino-ether lactone ex. (4)-I (1 equiv) was suspended in dioxane (0.2 M). 4 M HCl in dioxane (6 equiv) was then added and the resulting mixture was stirred at 40° C. for 2 hrs. The reaction mixture was concentrated under reduced pressure to afford free amino-ether lactone ex. (4)-II. The obtained product was carried on to the next step without purification.

### General Method III- Representative Procedure for Reduction Amination

[0804] Free amino-ether lactone ex. (4)-II (1 equiv) was suspended in DMF (0.2 M). Aldehyde (3 equiv) was added. The reaction stirred for 5 minutes at r.t. then NaBH(OAc)₃ (3 equiv) was added. The reaction stirred at r.t. for 18 hrs. The reaction was quenched with saturated aqueous sodium bicarbonate and extracted three times with dichloromethane. The organic phases were combined, passed through a phase separator and concentrated. The crude material was purified by silica gel chromatography.

### General Method IV- Representative Procedure for SOCl₂ Lactone Opening

[0805] To a solution of lactone (1 equiv) in dichloroethane (0.2 M) and EtOH (0.2 M) stirred at 70° C. was added thionyl chloride (12 equiv) dropwise and the resulting mixture was stirred at 70° C. overnight. The reaction mixture was cooled to r.t., diluted with water and quenched with saturated aqueous sodium bicarbonate. The reaction mixture was extracted with EtOAc three times and the combined organic phases were passed through a phase separator and concentrated. The crude material was purified by silica gel chromatography.

### General Method V- Representative Procedure for Lactam Ring Closing

[0806] 3-aminopiperidine-2,6-dione hydrochloride (2 equiv) was dissolved in DMF (0.2 M) in a 2 mL microwave vial,. DIPEA (5 equiv) was then added and the resulting mixture was stirred at r.t. for 15 minutes. α-chloro-ester (1 equiv) was dissolved in DMF (0.2 M) and added and stirring was continued at 85° C. for 18 hrs and then at 150° C. for 2 hrs under microwave radiation. The reaction mixture was concentrated onto celite® and purified by silica gel chromatography.

### General Method VI- Representative Procedure for Photoredox Catalysis with 3-(5-bromo-1-oxoisoindolin-2-yl)-1-((2-(trimethylsilyl)ethoxy)methyl)piperidine-2,6-dione

[0807] To an 8 mL red capped vial, 3-(5-bromo-1-oxoisoindolin-2-yl)-1-((2-(trimethylsilyl)ethoxy)methyl)piperidine-2,6-dione INT-XXX (1 equiv), alcohol building block (1.2 equiv), dtbbpy (0.05 equiv), NiCl₂(glyme) (0.05 equiv), and Ir[(dF(CF₃)ppy)₂dtbbpy]PF₆ (0.01 equiv) were added. ACN (0.3 M) was then added followed by 2,2,6,6-tetramethylpiperidine (1.05 equiv). The reaction flask was evacuated and backfilled with nitrogen three times. The reaction mixture was placed in a photoreactor plate under blue LED light for 18 hrs, and then filtered and concentrated.

### General Method VII- Representative Procedure for Global Deprotection

[0808] To a solution of SEM protected glutarimide, Boc protected amine and isoindoline derivative (ex. INT-2) (1 equiv) in ACN (0.11 M) was added methanesulfonic acid (11.2 equiv). The resulting mixture was stirred at r.t. for 72 hrs and then cooled to 0° C. Triethylamine (13.04 equiv) was then added, followed by N1,N2-dimethylethane-1,2-diamine (1.5 equiv). The reaction mixture was then stirred at r.t. for 4 hrs, concentrated, and purified by reverse phase HPLC.

[0809] 3-bromo-1-oxoisoindolin-2-yl)piperidine-2,6-dione (INT-XX)

[chemical structure]

### Step 1. Ethyl 4-bromo-2-(chloromethyl)benzoate (1-1b)

[0810] A stirred suspension of 5-bromophthalide 1-1a (1200 g, 5.633 mol) in EtOH (12 L) was heated to 68-72° C. SOC1₂ (2.40 L, 33.0 mol) was then added dropwise over a period of 7 h. The reaction mixture was concentrated under reduced pressure to about 4 L, and then water (5 L) and MTBE (5 L) were added. The resulting mixture was stirred for 40 min. The phases were separated and the aqueous phase was extracted with MTBE (1 x 5 L). The combined organic layers were washed with 5% aq. NaHCO₃ (5 L), dried over Na₂SO₄, filtered, and concentrated to dryness to afford 1-1b (1450 g, 5.25 mol, 93% yield) as a pale brown solid. MS [M+Na]⁺ = 298.9. ¹H NMR (400 MHz, Chloroform-d) δ 7.85 (d, J= 8.4 Hz, 1H), 7.72 (d, J= 2.0 Hz, 1H), 7.52 (dd, J= 8.3, 2.0 Hz, 1H), 5.00 (s, 2H), 4.38 (q, J= 7.1 Hz, 2H), 1.40 (t,J= 7.1 Hz, 3H).

### Step 2. 3-(5-bromo-1-oxoisoindolin-2-yl)piperidine-2,6-dione (INT-XX)

[0811] To a stirred suspension of 3-aminopiperidine-2,6-dione hydrochloride 1-1c (596.3 g, 3.623 mol) and i-Pr₂NEt (2.50 L, 14.3 mol) in DMF (5.0 L) was added 1-1b (1000 g, 3.623 mmol) and the resulting reaction mixture was stirred at 85-90° C. for 24 h. The reaction mixture was then allowed to cool to room temperature, water (20 L) was added, and the resulting mixture was stirred for 12 h. The formed precipitate was filtered and washed with water (5 L) and MeOH (2 L). The crude solid was slurried in MeOH (5 L) for 1 h, filtered, and washed with MeOH (2 L). The resulting solid was then taken in EtOAc (10 L) and stirred for 1 h. The obtained suspension was then filtered, washed with EtOAc (5 L), and dried under reduced pressure at 45-50° C. to afford INT-XX (740 g, 2.29 mol, 63% yield) as an off-white solid. MS [M+1]⁺ = 323.2. ¹H NMR (400 MHz, DMSO-d₆) δ 10.99 (s, 1H), 7.91-7.88 (m, 1H), 7.72 (dd, J= 8.1, 1.6 Hz, 1H), 7.67 (d, J= 8.0 Hz, 1H), 5.11 (dd, J= 13.3, 5.1 Hz, 1H), 4.47 (d, J= 17.7 Hz, 1H), 4.34 (d, J= 17.7 Hz, 1H), 2.98-2.83 (m, 1H), 2.65-2.55 (m, 1H), 2.45-2.29 (m, 1H), 2.01 (dtd, J= 12.7, 5.3, 2.3 Hz, 1H).

[0812] 3-bromo-1-oxoisoindolin-2-yl)-1-((2-(trimethylsilyl)ethoxy)methyl)piperidine-2,6-dione (INT-XXX)

[chemical structure]

[0813] To a stirred solution of INT-XX (10.0 g, 30.9 mmol) and DBU (6.9 mL, 46 mmol) in DMF (95 mL) was added SEMCl (6.6 mL, 37 mmol) at 0° C. and the resulting reaction mixture was allowed to warm to room temperature and then stirred for 5 h. An additional portion of DBU (3.5 mL, 23 mmol) and SEMCl (3.3 mL, 19 mmol) was added and stirring was continued for an additional 2 h. The reaction mixture was then quenched with sat. aq. NH₄Cl (250 mL) and extracted with EtOAc (x 3). The combined organic phases were dried over Na₂SO₄, filtered, and concentrated to dryness. The crude material was dissolved in minimal amount of EtOAc (~50 mL) and Et₂O:heptane (v/v = 1:2, 400 mL) was added. The resulting cloudy solution was left standing at -5° C. overnight. The formed precipitate was filtered, washed with heptane (x3), and dried under vacuum to afford INT-XXX (11.53 g, 25.4 mmol, 82% yield) as an off-white solid. MS [M+H]⁺ = 453.4. ¹H NMR (400 MHz, Chloroform-d) δ 7.75 (d, J= 8.6 Hz, 1H), 7.66-7.61 (m, 2H), 5.37-5.09 (m, 3H), 4.48 (d, J= 16.2 Hz, 1H), 4.32 (d, J= 16.2 Hz, 1H), 3.74-3.50 (m, 2H), 3.11-2.98 (m, 1H), 2.94-2.83 (m, 1H), 2.33 (qd, J= 13.2, 4.7 Hz, 1H), 2.24-2.15 (m, 1H), 0.97-0.90 (m, 2H), 0.00 (s, 9H).

### Example 3.1: Diastereomeric Mixture of Tert-butyl 2-(1-hydroxyethyl)piperidine-1-carboxylate (INT-1)

[chemical structure]

[0815] A 20 mL vial was charged with 1-(piperidin-2-yl)ethanol (0.5 g, 3.87 mmol), di-tert-butyl dicarbonate (0.98 mL, 4.26 mmol), K₂CO₃ (0.59 g, 4.26 mmol) and THF (20 mL) and the resulting mixture was stirred vigorously at r.t. for 48 hours. The reaction mixture was diluted with brine and extracted with EtOAc three times. The organic phases were combined, passed through a phase separator, and concentrated onto celite®. The celite® residue was purified by silica gel chromatography (eluting with 0-100% ethyl acetate in heptane using ELSD detection) to afford a diastereomeric mixture of tert-butyl 2-(l-hydroxyethyl)piperidine-l-carboxylate INT-1 (680 mg, 2.97 mmol, 77 % yield) as a clear oil. ¹H NMR (400 MHz, Chloroform-d) δ 4.17 - 3.90 (m, 3H), 2.99 - 2.68 (m, 1H), 2.05 - 1.98 (m, 1H), 1.85 - 1.54 (m, 5H), 1.49 (s, 9H), 1.23 (dd, J= 9.3, 6.1 Hz, 3H).

### Example 3.2: Diastereomers of 5-(1-(1-ethylpiperidin-2-yl)ethoxy)isobenzofuran-1(3H)-one (INT-3)

[chemical structure]

### Step 1: Diastereomeric Mixture of Tert-butyl 2-(1-((1-oxo-1,3-dihydroisobenzofuran-5-yl)oxy)ethyl)piperidine-1-carboxylate (1)

[0817] The product was made according to General Method I starting from 5-bromoisobenzofuran-l(3H)-one and a diastereomeric mixture of tert-butyl 2-(1-hydroxyethyl)piperidine-1-carboxylate INT-1 (0.67 g, 2.93 mmol). The reaction mixture was filtered and the solid was washed with dichloromethane. The filtrate was concentrated and the crude material was dissolved in minimal methanol and purified by reverse phase ELSD/uV triggered silica gel chromatography (eluting with 5-50% 95:5 ACN:H₂O to 95:5 H₂O:ACN both with 5 mM NH₄OAc as modifier) to afford a diastereomeric mixture of tert-butyl 2-(1-((1-oxo-1,3-dihydroisobenzofuran-5-yl)oxy)ethyl)piperidine-1-carboxylate 1 (533 mg, 1.46 mmol, 50.3% yield) as an orange solid. Alternatively, the crude material can be purified by silica gel chromatography (eluting with 0-100% 3:1 EtOAc:EtOH with 1% TEA in heptane) to afford the desired product. LCMS [M+H-tButyl]⁺: 306.1. ¹H NMR (400 MHz, Chloroform-d) δ 7.69 (d, J= 8.5 Hz, 1H), 6.91 (dd,J= 8.5, 2.1 Hz, 1H), 6.79 (dd,J= 6.9, 2.0 Hz, 1H), 5.12 (d,J= 6.0 Hz, 2H), 4.64 (ddd, J = 14.1, 8.3, 6.2 Hz, 1H), 4.32 - 4.14 (m, 1H), 2.69 - 2.48 (m, 1H), 1.90 - 1.81 (m, 1H), 1.69 - 1.58 (m, 1H), 1.54 - 1.40 (m, 4H), 1.34 (s, 10H), 1.19 (d, J= 6.1 Hz, 3H).

### Step 2: Diastereomeric Mixture of 5-(1-(piperidin-2-yl)ethoxy)isobenzofuran-1(3H)-one (2)

[0818] The product was made according to General Method II starting from a diastereomeric mixture of tert-butyl 2-(1-((1-oxo-1,3-dihydroisobenzofuran-5-yl)oxy)ethyl)piperidine-1-carboxylate 1 (0.53 g, 1.46 mmol). The reaction mixture was concentrated to afford a diastereomeric mixture of 5-(1-(piperidin-2-yl)ethoxy)isobenzofuran-1(3H)-one 2 as a crude orange solid. The crude product was carried on to the next step without purification. LCMS [M+H]⁺: 262.1.

### Step 3: Diastereomers 5-(1-(1-ethylpiperidin-2-yl)ethoxy)isobenzofuran-1(3H)-one (INT-3)

[0819] The product was made according to General Method III starting from a diastereomeric mixture of 5-(1-(piperidin-2-yl)ethoxy)isobenzofuran-l(3H)-one 2 (0.39 g, 1.48 mmol) and acetaldehyde (0.25 mL, 4.42 mmol). The reaction mixture was quenched with saturated aqueous sodium bicarbonate and extracted three times with dichloromethane. The organic phases were combined, passed through a phase separator and concentrated. The crude material was purified by silica gel chromatography (eluting with 0-20% methanol in dichloromethane) to afford a diastereomeric mixture of 5-(1-(1-ethylpiperidin-2-yl)ethoxy)isobenzofuran-1(3H)-one INT-3 (372 mg, 1.29 mmol, 87 % yield) as brown oil. LCMS [M+H]⁺: 290.2. ¹H NMR (400 MHz, Chloroform-d) δ 7.81 (dd, J= 8.5, 1.9 Hz, 1H), 7.03 (dd, J= 8.5, 2.1 Hz, 1H), 6.92 (s, 1H), 5.24 (s, 2H), 4.93 - 4.62 (m, 1H), 3.06 - 2.81 (m, 2H), 2.60 - 2.43 (m, 2H), 2.32 - 2.17 (m, 1H), 1.77 (dd, J= 27.1, 14.7 Hz, 2H), 1.66 - 1.48 (m, 3H), 1.35 (dd, J= 11.4, 6.3 Hz, 4H), 1.11 - 0.97 (m, 3H). The diastereomeric mixture of isomers was separated via chiral SFC [Column 21 x 250 mm Chiralpak IC; CO₂ Co-solvent 30% IPA with 10 mM NH₃; at 80 g/min at 125 bar at 25° C.] to afford a mixture of two diastereomers and two clean single diastereomers: Peak 3: Diastereomer 3 of 5-(1-(1-ethylpiperidin-2-yl)ethoxy)isobenzofuran-1(3H)-one (101 mg, 0.349 mmol, 23.7%) as an orange solid. Chiral SFC Rt 14 mins. Peak 4: Diastereomer 4 of 5-(1-(1-ethylpiperidin-2-yl)ethoxy)isobenzofuran-1(3H)-one (105 mg, 0.363 mmol, 24.6%) as an orange solid. Chiral SFC Rt 19 mins. The mixture of isomers was further separated via chiral SFC [Column 21 x 250 mm Chiralpak IG; CO₂ Co-solvent 25% 1:1 MeOH:IPA with 10 mM NH₃; at 80 g/min at 125 bar at 25° C.] to afford the other two diastereomers: Peak 1: Diastereomer 1 of 5-(1-(1-ethylpiperidin-2-yl)ethoxy)isobenzofuran-1(3H)-one (30.4 mg, 0.105 mmol, 7.1%) as an orange solid. Chiral SFC Rt 4.9 mins. Peak 2: Diastereomer 2 of 5-(1-(1-ethylpiperidin-2-yl)ethoxy)isobenzofuran-1(3H)-one (35 mg, 0.121 mmol, 8.2%) as an orange solid. Chiral SFC Rt 4.7 mins.

### Example 3.3: Diastereomer of 3-(5-(1-(1-ethylpiperidin-2-yl)ethoxy)-1-oxoisoindolin-2-yl)piperidine-2,6-dione(I-5)

[chemical structure]

### Step 1: Single Diastereomer of Ethyl 2-(chloromethyl)-4-(1-(1-ethylpiperidin-2-yl)ethoxy)benzoate (4)

[0821] The product (4) was made according to General Method IV starting from a_single diastereomer 5-(1-(1-ethylpiperidin-2-yl)ethoxy)isobenzofuran-1(3H)-one INT-3 peak 3 (0.1 g, 0.346 mmol). The crude material was purified by silica gel chromatography (eluting with 0-100% ethyl acetate in heptane) to afford a single diastereomer ethyl 2-(chloromethyl)-4-(1-(1-ethylpiperidin-2-yl)ethoxy)benzoate 4 (102 mg, 0.288 mmol, 83% yield) as an orange oil. LCMS [M+H]⁺: 354.6. ¹H NMR (400 MHz, Chloroform-d) δ 7.98 (d, J= 8.7 Hz, 1H), 7.07 (d, J= 2.6 Hz, 1H), 6.85 (dd, J= 8.8, 2.6 Hz, 1H), 5.05 (s, 2H), 4.65 (qd, J= 6.4, 2.8 Hz, 1H), 4.35 (q, J= 7.1 Hz, 2H), 3.02 - 2.89 (m, 2H), 2.58 - 2.49 (m, 1H), 2.45 (dt, J = 10.2, 2.9 Hz, 1H), 2.23 (ddd, J= 12.0, 10.8, 3.2 Hz, 1H), 1.83 - 1.68 (m, 2H), 1.63 - 1.45 (m, 3H), 1.39 (t, J= 7.1 Hz, 3H), 1.36 - 1.21 (m, 4H), 1.02 (t, J= 7.1 Hz, 3H).

### Step 2: Diastereomer 3-(5-(1-(1-ethylpiperidin-2-yl)ethoxy)-1-oxoisoindolin-2-yl)piperidine-2,6-dione (I-5)

[0822] Compound 1-5 was made according to General Method V starting from a single diastereomer ethyl 2-(chloromethyl)-4-(1-(1-ethylpiperidin-2-yl)ethoxy)benzoate 4 (102 mg, 0.288 mmol). The reaction mixture was purified by silica gel chromatography (eluting with 0-100% 3:1 EtOAc:EtOH with 1% TEA in EtOAc) to afford single diastereomer 3-(5-(1-(1-ethylpiperidin-2-yl)ethoay)-1-oxoisoindolin-2-yl)piperidine-2,6-dione 1-5 (28.4 mg, 0.069 mmol, 23.92% yield) as a white solid. LCMS [M+H]⁺: 400.3. ¹H NMR (400 MHz, DMSO-d₆) δ 10.97 (s, 1H), 7.61 (d, J = 8.4 Hz, 1H), 7.18 (d, J = 2.2 Hz, 1H), 7.03 (dd,J= 8.4, 2.2 Hz, 1H), 5.07 (dd,J= 13.3, 5.1 Hz, 1H), 4.77 - 4.68 (m, 1H), 4.39 (d,J= 17.2 Hz, 1H), 4.26 (d, J= 17.1 Hz, 1H), 2.96 - 2.83 (m, 3H), 2.64 - 2.54 (m, 1H), 2.45 - 2.30 (m, 2H), 2.26 - 2.13 (m, 1H), 2.01 - 1.92 (m, 1H), 1.70 (d,J= 10.2 Hz, 2H), 1.55 - 1.22 (m, 8H), 0.94 (t,J= 7.0 Hz, 3H).

### Example 3.4: Diastereomer 3-(1-oxo-5-(((R)-piperidin-2-yl)methoxy)isoindolin-2-yl)piperidine-2,6-dione (I-47)

[chemical structure]

### Step 1: Diastereomer Tert-butyl (2R)-2-(((2-(2,6-dioxo-1-((2-(trimethylsilyl)ethoxy)methyl)piperidin-3-yl)-1-oxoisoindolin-5-yl)oxy)methyl)piperidine-1-carboxylate (46)

[0824] Intermediate 46 was prepared according to General Method VI starting from (R)-1-N-Boc-2-hydroxymethylpiperidine (28 mg, 0.132 mmol). The reaction mixture was filtered and concentrated to afford diastereomer tert-butyl (2R)-2-(((2-(2,6-dioxo-1-((2-(trimethylsilyl)ethoxy)methyl)piperidin-3-y1)-1-oxoisoindolin-5-yl)oxy)methyl)piperidine-1-carboxylate 46 as a brown solid. The crude material was taken through to the next step without purification. LCMS [M+H-156.3 (TMSCH2CH2,tButyl)]⁺: 432.26.

### Step 2: Diastereomer 3-(1-oxo-5-(((R)-piperidin-2-yl)methoxy)isoindolin-2-yl)piperidine-2,6-dione (I-47)

[0825] Compound 1-47 was prepared according to General Method VII starting from tert-butyl (2R)-2-(((2-(2,6-dioxo-1-((2-(trimethylsilyl)ethoxy)methyl)piperidin-3-yl)-1-oxoisoindolin-5-yl)oxy)methyl)piperidine-1-carboxylate 46 (64.7 mg, 0.11 mmol) . The reaction mixture was concentrated, dissolved in DMSO, and purified by basic mass triggered reverse phase HPLC (eluting with 10-30% ACN in water with 5 mM NH4OH as modifier). Each test-tube contained 3 drops of formic acid prior to collection. Pure fractions were combined, concentrated, and lyophilized to afford diastereomer 3-(1-oxo-5-(((R)-piperidm-2-yl)methoxy)isoindolm-2-yl)piperidme-2,6-dione 1-47 (4.55 mg, 9.62 µmol, 8.74 % yield) as a cream solid. LCMS [M+H]⁺: 358.3. ¹H NMR (400 MHz, DMSO-d₆) δ 10.95 (s, 1H), 8.29 (s, 1H), 7.62 (d,J= 8.4 Hz, 1H), 7.18 (d,J= 2.3 Hz, 1H), 7.06 (dd,J= 8.5, 2.2 Hz, 1H), 5.07 (dd, J= 13.3, 5.0 Hz, 1H), 4.39 (d, J= 17.1 Hz, 1H), 4.26 (d, J= 17.3 Hz, 1H), 3.98 (dd, J= 9.5, 4.6 Hz, 1H), 3.88 (ddd, J= 9.2, 7.2, 1.6 Hz, 1H), 3.03 - 2.83 (m, 3H), 2.68 - 2.55 (m, 2H), 2.44 - 2.29 (m, 1H), 2.03 - 1.92 (m, 1H), 1.80 - 1.61 (m, 2H), 1.59 - 1.52 (m, 1H), 1.49 - 1.43 (m, 1H), 1.38 - 1.29 (m, 2H), 1.21 - 1.10 (m, 1H).

### Example 3.5: Diastereomer 1-(hydroxymethyl)-3-(1-oxo-5-(((S)-piperidin-2-yl)methoxy)isoindolin-2-yl)piperidine-2,6-dione (I-49)

[chemical structure]

### Step 1: Diastereomer Tert-butyl (2S)-2-(((2-(2,6-dioxo-1-((2-(trimethylsilyl)ethoxy)methyl)piperidin-3-yl)-1-oxoisoindolin-5-yl)oxy)methyl)piperidine-1-carboxylate (48)

[0827] Intermediate 48 was prepared according to General Method VI starting from (S)-N-Boc-piperidine-2-methanol (28 mg, 0.132 mmol). The reaction mixture was filtered and concentrated to afford tert-butyl (2S)-2-(((2-(2,6-dioxo-1-((2-(trimethylsilyl)ethoxy)methyl)piperidin-3-yl)-1-oxoisoindolin-5-yl)oxy)methyl)piperidine-1-carboxylate 48 as a brown oil. The crude material was carried through the next reaction without purification. LCMS [M+H]⁺: 156.3 (TMSCH₂CH₂,tButyl)]⁺: 432.2.

### Step 2: Diastereomer 3-(1-oxo-5-(((S)-piperidin-2-yl)methoxy)isoindolin-2-yl)piperidine-2,6-dione (I-49)

[0828] Compound I-49 was prepared according to General Method VII starting from tert-butyl (2S)-2-(((2-(2,6-dioxo-1-((2-(trimethylsilyl)ethoxy)methyl)piperidin-3-yl)-1-oxoisoindolin-5-yl)oxy)methyl)piperidine-1-carboxylate 48 (64.7 mg, 0.11 mmol). The reaction mixture was concentrated and a third of the material was purified by basic mass triggered reverse phase HPLC (eluting with 10-30% ACN in water with 5 mM NH4OH as modifier). Each test-tube contained 3 drops of formic acid prior to collection. Pure fractions were combined, concentrated, and lyophilized to afford diastereomer 3-(1-oxo-5-(((S)-piperidin-2-yl)methoxy)isoindolin-2-yl)piperidine-2,6-dione 1-49 (3.94 mg, 8.33 µmol, 4.48% yield) as a cream solid. The rest of the material was carried through to the next reaction without purification. LCMS [M+H]⁺: 358.2. ¹H NMR (400 MHz, DMSO-d₆) δ 10.92 (s, 1H), 7.62 (d, J= 8.4 Hz, 1H), 7.21 - 7.15 (m, 1H), 7.06 (dd, J= 8.4, 2.3 Hz, 1H), 5.07 (dd, J= 13.3, 5.0 Hz, 1H), 4.39 (d, J= 17.3 Hz, 1H), 4.26 (d, J= 17.3 Hz, 1H), 4.05 - 3.96 (m, 1H), 3.96 - 3.83 (m, 1H), 3.02 - 2.87 (m, 3H), 2.63 - 2.54 (m, 2H), 2.45 - 2.33 (m, 1H), 2.03 - 1.91 (m, 1H), 1.80 - 1.59 (m, 2H), 1.59 - 1.50 (m, 1H), 1.49 - 1.43 (m, 2H), 1.38 - 1.31 (m, 1H), 1.21 - 1.09 (m, 1H).

### Example 3.6: 3-(5-(((R)-1-ethylpiperidin-2-yl)methoxy)-1-oxoisoindolin-2-yl)piperidine-2,6-dione

[chemical structure]

Compound I-50 was prepared according to General Method III starting from 1-(hydroxymethyl)-3-(1-oxo-5-(((R)-piperidin-2-yl)methoxy)isoindolin-2-yl)piperidine-2,6-dione 1-47 (26 mg, 0.073 mmol) and acetaldehyde (0.5 mL, 8.85 mmol). The reaction mixture was quenched with saturated aqueous sodium bicarbonate and extracted 4 times with 4:1 dichloromethane:isopropanol. The organic phases were combined, passed through a phase separator and concentrated. The crude material was purified by basic mass triggered reverse phase HPLC (eluting with 15-40% ACN in water with 5 mM NH4OH as modifier). Each test-tube contained 3 drops of formic acid prior to sample collection. Pure fractions were combined, concentrated, and lyophilized to afford 3-(5-(((R)-1-ethylpiperidin-2-yl)methoxy)-1-oxoisoindolin-2-yl)piperidine-2,6-dione I-50 (4.59 mg, 9.90 µmol, 13.56% yield) as an orange solid. LCMS [M+H]⁺: 386.3. ¹H NMR (400 MHz, DMSO-d₆) δ 10.96 (s, 1H), 8.23 (s, 1H), 7.62 (d, J = 8.4 Hz, 1H), 7.23 - 7.14 (m, 1H), 7.05 (dd, J= 8.4, 2.2 Hz, 1H), 5.07 (dd, J= 13.3, 5.1 Hz, 1H), 4.39 (d, J = 17.2 Hz, 1H), 4.26 (d, J= 17.2 Hz, 1H), 4.21 - 4.11 (m, 1H), 4.07 - 3.95 (m, 1H), 2.91 (ddd, J= 18.0, 13.6, 5.5 Hz, 1H), 2.81 - 2.55 (m, 3H), 2.44 - 2.32 (m, 2H), 2.24 (td, J= 11.6, 10.6, 3.2 Hz, 1H), 2.17 -2.10 (m, 1H), 2.02 - 1.93 (m, 1H), 1.78 - 1.70 (m, 1H), 1.70 - 1.61 (m, 1H), 1.58 - 1.51 (m, 1H), 1.50 -1.40 (m, 2H), 1.35 - 1.22 (m, 1H), 0.97 (t, J= 7.1 Hz, 3H).

[0830] The following compounds were made according to Example 3.6, starting from the final product of either (I-47) or (I-49).

| | | | |
|---|---|---|---|
| I-50bi | [chemical structure] | 484.33 | 0.3 |
| I-50bt | [chemical structure] | 454.32 | 0.44 |
| I-50cn | [chemical structure] | 470.32 | 0.37 |
| I-50co | [chemical structure] | 546.4 | 0.32 |
| I-50dl | [chemical structure] | 414.3 | 0.39 |
| I-50ee | [chemical structure] | 386.2 | 0.36 |
| I-50em | [chemical structure] | 456.33 | 0.36 |
| | [chemical structure] | | |
| I-50bw | ¹H NMR: (400 MHz, DMSO-d₆) δ 11.03 (s, 1H), 7.68 (d, J = 8.4 Hz, 1H), 7.53 (d, J = 7.5 Hz, 1H), 7.31 - 7.18 (m, 2H), 7.18 - 7.05 (m, 3H), 5.13 (dd, J= 13.3, 5.1 Hz, 1H), 4.49 - 4.26 (m, 3H), 4.17 (dd, J - 10.2, 5.4 Hz, 1H), 3.99 (d, J = 13.8 Hz, 1H), 3.64 (d, J = 13.8 Hz, 1H), 3.03 - 2.85 (m, 6H), 2.81 - 2.71 (m, 2H), 2.69 - 2.62 (m, 3H), 2.50 - 2.27 (m, 6H), 2.07 - 2.00 (m, 1H), 1.88 - 1.80 (m, 1H), 1.74 - 1.42 (m, 5H). | 546.4 | 0.32 |

### Example 3.7: (3,3-difluorocyclobutyl)methyl Methanesulfonate (INT-51)

[chemical structure]

To a solution of (3,3-difluorocyclobutyl)methanol (0.16 g, 1.310 mmol) in DCM (1.4 mL) was added DIPEA (0.46 mL, 2.62 mmol), 1-methyl-1H-imidazole (0.21 mL, 2.62 mmol), and methanesulfonyl chloride (0.15 mL, 1.96 mmol) dropwise. The resulting mixture was stirred at r.t. for 18 hrs and then diluted with DCM (30 mL). The organic phase was washed with 1 M aqueous HCl three times and saturated aqueous sodium bicarbonate twice. The combined organic phases were passed through a phase separator and concentrated to afford (3,3-difluorocyclobutyl)methyl methane sulfonate INT-51 (227 mg, 1.134 mmol, 87% yield) as an orange oil. ¹H NMR (400 MHz, Chloroform-d) δ 4.33 - 4.24 (m, 2H), 3.07 (s, 3H), 2.82 - 2.68 (m, 2H), 2.67 - 2.53 (m, 1H), 2.52 - 2.36 (m, 2H).

### Example 3.8: Diastereomer 3-(5-(((R)-1-((3,3-difluorocyclobutyl)methyl)piperidin-2-yl)methoxy)-1-oxoisoindolin-2-yl)piperidine-2,6-dione

[chemical structure]

(3,3-difluorocyclobutyl)methylmethanesulfonate INT-51 (101 mg, 0.504 mmol) was added to a 40 mL vial and dissolved in DMF (2.1 mL). 1-(hydroxymethyl)-3-(1-oxo-5-(((R)-piperidin-2-yl)methoxy)isoindolin-2-yl)piperidine-2,6-dione I-47 (0.15 g, 0.420 mmol) was added followed by the addition of DIPEA (0.15 mL, 0.839 mmol). The resulting mixture was stirred at r.t. for 72 hrs, at 50° C. for 18 hrs, at 60° C. for 24 hrs, then at 100° C. for 24 hrs. The reaction mixture was quenched with saturated aqueous sodium bicarbonate and extracted with 4:1 DCM:iPrOH three times. The organic phases were combined, passed through a phase separator and concentrated onto celite® The crude material was purified by silica gel chromatography (eluting with 0-100% 3:1 EtOAc:EtOH with 1% TEA in heptane) to afford 3-(5-(((R)-1-((3,3-difluorocyclobutyl)methyl)piperidin-2-yl)methoay)-1-oxoisoindolin-2-yl)piperidine-2,6-dione I-52 (38.9 mg, 0.081 mmol, 19.28% yield) as a white solid. LCMS [M+H]⁺: 462.5. ¹H NMR (400 MHz, DMSO-d₆) δ 10.97 (s, 1H), 7.64 (d, J= 8.4 Hz, 1H), 7.20 (d, J= 2.3 Hz, 1H), 7.07 (dd,J= 8.4, 2.3 Hz, 1H), 5.08 (dd, J= 13.3, 5.2 Hz, 1H), 4.40 (d, J= 17.1 Hz, 1H), 4.28 (d, J= 17.3 Hz, 1H), 4.23 - 4.13 (m, 1H), 4.13 - 4.01 (m, 1H), 2.98 - 2.77 (m, 3H), 2.74 - 2.57 (m, 4H), 2.45 - 2.13 (m, 6H), 2.04 - 1.93 (m, 1H), 1.77 - 1.60 (m, 2H), 1.58 - 1.27 (m, 4H).

### Example 3.9: 3-(5-(((R)-1-isopropylpiperidin-2-yl)methoxy)-1-oxoisoindolin-2-yl)piperidine-2,6-dione (I-53)

[chemical structure]

3-oxo-5-(((R)-piperidin-2-yl)methoxy)isoindolin-2-yl)piperidine-2,6-dione 1-47 (68 mg, 0.190 mmol) was suspended in DMA (1.90 mL). K₂CO₃ (39 mg, 0.285 mmol) was added and the resulting mixture was evacuated and backfilled with nitrogen 3 times. 2-iodopropane (0.10 mL, 0.95 mmol) was added and the reaction mixture was heated at 100° C. for 3 hrs under microwave radiation. The reaction mixture was quenched with 50% saturated aqueous sodium bicarbonate and extracted three times with 4:1 DCM:iPrOH. The organic phases were combined, passed through a phase separator, and concentrated onto celite®. The crude material was purified by silica gel chromatography (eluting with 0-100% 3:1 ethyl acetate:ethanol with 1% TEA in heptane). Pure fractions were combined, concentrated and lyophilized to afford 3-(5-(((R)-1-isopropylpiperidin-2-yl)methoxy)-1-oxoisoindolin-2-yl)piperidine-2,6-dione I-53 (52.96 mg, 0.130 mmol, 68.3% yield) as a white solid. LCMS [M+H]⁺: 400.6. ¹H NMR (400 MHz, DMSO-d₆) δ 10.96 (s, 1H), 7.62 (d, J = 8.3 Hz, 1H), 7.19 (d, J = 2.3 Hz, 1H), 7.05 (dd, J= 8.7, 2.1 Hz, 1H), 5.07 (dd, J= 13.3, 5.2 Hz, 1H), 4.39 (d, J= 17.1 Hz, 1H), 4.26 (d, J= 17.2 Hz, 1H), 4.20 - 3.92 (m, 2H), 3.25 - 3.09 (m, 1H), 2.97 - 2.70 (m, 3H), 2.59 (ddd, J= 17.2, 4.7, 2.2 Hz, 1H), 2.45 - 2.31 (m, 1H), 2.15 (s, 1H), 2.02 - 1.91 (m, 1H), 1.82 - 1.64 (m, 2H), 1.62 - 1.52 (m, 1H), 1.44 - 1.22 (m, 3H), 1.12 - 0.98 (m, 3H), 0.96 - 0.86 (m, 3H).

### Example 3.10: Enantiomers 5-((4-ethyl-6,6-dimethylmorpholin-3-yl)methoxy)isobenzofuran-1(3H)-one (INT-56)

[chemical structure]

### Step 1: Rac-Tert-Butyl 2,2-dimethyl-5-(((1-oxo-1,3-dihydroisobenzofuran-5-yl)oxy)methyl)morpholine-4-carboxylate (54)

[0835] Intermediate 54 was prepared according to General Method I starting from 4-boc-5-hydroxymethyl-2,2-dimethyl-morpholine (507 mg, 2.065 mmol). The crude material was purified by silica gel chromatography (eluting with 0-100% ethyl acetate in heptane) to afford rac-tert-butyl 2,2-dimethyl-5-(((1-oxo-1,3-dihydroisobenzofuran-5-yl)oxy)methyl)morpholine-4-carboxylate 54 (587 mg, 1.555 mmol, 83% yield) as a cream solid. LCMS [M+H]⁺: 322.1 (mass without tert-butyl). ¹H NMR (400 MHz, Chloroform-d) δ 7.73 (d, J= 8.5 Hz, 1H), 7.00 (dd, J= 8.5, 2.2 Hz, 1H), 6.93 (d, J= 2.1 Hz, 1H), 5.19 (s, 2H), 4.29 - 4.06 (m, 2H), 3.94 - 3.54 (m, 5H), 1.41 (s, 9H), 1.20 (s, 3H), 1.16 (s, 3H).

### Step 2: Rac-5-((6,6-dimethylmorpholin-3-yl)methoxy)isobenzofuran-1(3H)-one (55)

[0836] Intermediate 55 was prepared according to General Method II starting from tert-butyl 2,2-dimethyl-5-(((1-oxo-1,3-dihydroisobenzofuran-5-yl)oxy)methyl)morpholine-4-carboxylate 54 (0.587 g, 1.555 mmol). The reaction mixture was concentrated to afford 5-((6,6-dimethylmorpholin-3-yl)methoxy)isobenzofuran-1(3H)-one 55 as a white solid. The crude material was used in the next reaction without purification. LCMS [M+H]⁺: 278.3.

### Step 3: Enantiomers 5-((4-ethyl-6,6-dimethylmorpholin-3-yl)methoxy)isobenzofuran-1(3H)-one (INT-56)

[0837] INT-56 was prepared according to General Method III startting from 5-((6,6-dimethylmorpholin-3-yl)methoxy)isobenzofuran-1(3H)-one 55 (1.11 g, 4.0 mmol) and acetaldehyde (0.5 mL, 9.33 mmol). The crude material was purified by silica gel chromatography (eluting with 0-100% 3:1 EtOAc:EtOH with 1% TEA in heptane) to afford 5-((4-ethyl-6,6-dimethylmorpholin-3-yl)methoxy)isobenzofuran-1(3H)-one INT-56 (275 mg, 0.901 mmol, 22.51% yield) as a pink solid. LCMS [M+H]⁺: 306.5. ¹H NMR (400 MHz, Chloroform-d) δ 7.79 (d, J= 8.5 Hz, 1H), 7.03 (dd, J= 8.5, 2.2 Hz, 1H), 6.95 - 6.89 (m, 1H), 5.23 (s, 2H), 4.20 (dd, J= 9.5, 4.4 Hz, 1H), 4.07 (dd, J= 9.5, 6.4 Hz, 1H), 3.85 (dd, J= 11.6, 3.5 Hz, 1H), 3.70 (dd, J= 11.6, 7.0 Hz, 1H), 2.92 - 2.79 (m, 1H), 2.79 - 2.66 (m, 1H), 2.62 - 2.47 (m, 2H), 2.23 (d, J= 11.5 Hz, 1H), 1.28 (s, 3H), 1.25 (s, 3H), 1.05 (t, J= 7.1 Hz, 3H). The mixture of isomers was separated via chiral SFC [Column 21 x 250 mm Chiralpak IF; CO₂ Co-solvent 25% MeOH; at 80 g/min at 125 bar at 25° C.] to afford two enantiomers: Peak 1: Enantiomer 1 of 5-((4-ethyl-6,6-dimethylmorpholin-3-yl)methoxy)isobenzofuran-1(3H)-one (99 mg, 0.324 mmol, 8.10% yield) as a light yellow solid. Chiral SFC Rt 2.5 mins. Peak 2: Enantiomer 2 of 5-((4-ethyl-6,6-dimethylmorpholin-3-yl)methoxy)isobenzofuran-1(3H)-one (111.5 mg, 0.365 mmol, 9.13% yield) as light red solid. Chiral SFC Rt 3.7 mins.

### Example 3.11: Diastereomer 3-(5-((4-ethyl-6,6-dimethylmorpholin-3-yl)methoxy)-1-oxoisoindolin-2-yl)piperidine-2,6-dione (I-58)

[chemical structure]

### Step 1: Single Enantiomer Ethyl 2-(chloromethyl)-4-((4-ethyl-6,6-dimethylmorpholin-3-yl)methoxy)benzoate (57)

[0839] Intermediate 57 was made according to General Method IV starting from 5-((6,6-dimethylmorpholin-3-yl)methoxy)isobenzofuran-1(3H)-one INT-56 Peak 1 (99 mg, 0.324 mmol) to afford a single enantiomer ethyl 2-(chloromethyl)-4-((4-ethyl-6,6-dimethylmorpholin-3-yl)methoxy)benzoate 57 as a brown oil. The crude material was taken through to the next step without purification. LCMS [M+H]⁺: 370.4.

### Step 2: Diastereomer 3-(5-((4-ethyl-6,6-dimethylmorpholin-3-yl)methoxy)-1-oxoisoindolin-2-yl)piperidine-2,6-dione (I-58)

[0840] Compound 1-58 was made according to General Method V starting from ethyl 2-(chloromethyl)-4-((4-ethyl-6,6-dimethylmorpholin-3-yl)methoxy)benzoate 57 (120 mg, 0.324 mmol). The crude material was purified by silica gel chromatography (eluting with 0-100% 3:1 ethyl acetate:ethanol with 1% TEA as modifier in heptane). Fractions containing desired product were combined, concentrated, and lyophilized to afford 3-(5-((4-ethyl-6,6-dimethylmorpholin-3-yl)methoxy)-1-oxoisoindolin-2-yl)piperidine-2,6-dione I-58 (71 mg, 0.169 mmol, 52.2 % yield) as a light purple solid. LCMS [M+H]⁺: 416.6. ¹H NMR (400 MHz, DMSO-d₆) δ 10.97 (s, 1H), 7.63 (d, J= 8.3 Hz, 1H), 7.26 - 7.15 (m, 1H), 7.08 (dd, J= 8.4, 2.3 Hz, 1H), 5.08 (dd, J= 13.3, 5.2 Hz, 1H), 4.40 (dd, J= 17.4, 1.8 Hz, 1H), 4.34 -4.15 (m, 2H), 4.12 - 4.00 (m, 1H), 3.74 (dd, J= 11.6, 3.4 Hz, 1H), 3.57 (dd, J= 11.4, 7.4 Hz, 1H), 2.91 (ddd, J= 17.3, 13.6, 5.4 Hz, 1H), 2.78 - 2.65 (m, 2H), 2.64 - 2.49 (m, 2H), 2.48 - 2.31 (m, 2H), 2.13 (d, J= 11.4 Hz, 1H), 2.03 - 1.93 (m, 1H), 1.21 (s, 3H), 1.16 (s, 3H), 0.98 (t, J= 7.1 Hz, 3H).

### Example 3.12: Diastereomer 3-(5-((4-ethyl-6,6-dimethylmorpholin-3-yl)methoxy)-1-oxoisoindolin-2-yl)piperidine-2,6-dione (I-60)

[chemical structure]

### Step 1: Single Enantiomer Ethyl 2-(chloromethyl)-4-((4-ethyl-6,6-dimethylmorpholin-3-yl)methoxy)benzoate (59)

[0842] Intermediate 59 was made according to General Method IV starting from 5-((6,6-dimethylmorpholin-3-yl)methoxy)isobenzofuran-1(3H)-one INT-56 Peak 2 (111.5 mg, 0.365 mmol) to afford ethyl 2-(chloromethyl)-4-((4-ethyl-6,6-dimethylmorpholin-3-yl)methoxy)benzoate 59 as a brown oil. The crude material was taken through to the next step without purification. LCMS [M+H]⁺:370.4.

### Step 2: Diastereomer (5-((4-ethyl-6,6-dimethylmorpholin-3-yl)methoxy)-1-oxoisoindolin-2-yl)piperidine-2,6-dione (I-60)

[0843] Compound 1-60 was made according to General Method V starting from ethyl 2-(chloromethyl)-4-((4-ethyl-6,6-dimethylmorpholin-3-yl)methoxy)benzoate 59 (135 mg, 0.365 mmol). The crude material was purified by silica gel chromatography (eluting with 0-100% 3:1 ethyl acetate:ethanol with 1% TEA as modifier in heptane). Fractions containing desired product were combined, concentrated, and lyophilized to afford (5-((4-ethyl-6,6-dimethylmorpholin-3-yl)methoxy)-1-oxoisoindolin-2-yl)piperidine-2,6-dione I-60 (68.1 mg, 0.161 mmol, 44.0% yield) as a light purple solid. LCMS [M+H]+: 416.4. ¹H NMR (400 MHz, DMSO-d₆) δ 10.97 (s, 1H), 7.63 (d, J= 8.5 Hz, 1H), 7.25 - 7.17 (m, 1H), 7.08 (dd, J= 8.5, 2.2 Hz, 1H), 5.08 (dd, J= 13.3, 5.0 Hz, 1H), 4.40 (dd, J= 17.6, 1.8 Hz, 1H), 4.34 - 4.16 (m, 2H), 4.12 - 4.01 (m, 1H), 3.74 (dd, J= 11.3, 3.4 Hz, 1H), 3.57 (dd, J= 11.6, 7.4 Hz, 1H), 2.91 (ddd, J= 17.2, 13.6, 5.4 Hz, 1H), 2.78 - 2.64 (m, 2H), 2.63 - 2.54 (m, 2H), 2.48 - 2.31 (m, 2H), 2.17 - 2.10 (m, 1H), 2.03 - 1.92 (m, 1H), 1.21 (s, 3H), 1.16 (s, 3H), 0.98 (t, J= 7.1 Hz, 3H).

### Example 3.13: Tert-butyl 4-(4-(((2R)-2-(((2-(2,6-dioxopiperidin-3-yl)-1-oxoisoindolin-5-yl)oxy)methyl)piperidin-1-yl)methyl)phenyl)piperazine-1-carboxylate (I-73)

[chemical structure]

Compound 1-73 was prepared according to General Method III starting from 3-(1-oxo-5-(((R)-piperidin-2-yl)methoxy)isoindolin-2-yl)piperidine-2,6-dione I-47 (0.45 g, 1.259 mmol) and 1-boc-4-(4-formylphenyl)piperazine (550 mg, 1.894 mmol). The crude material was purified by silica gel chromatography (eluting with 0-100% 3:1 ethyl acetate:ethanol with 1% TEA in heptane). Pure fractions were combined, concentrated, and lyophilized to afford tert-butyl 4-(4-(((2R)-2-(((2-(2,6-dioxopiperidin-3-yl)-1-oxoisoindolin-5-yl)oxy)methyl)piperidin-1-yl)methyl)phenyl)piperazine-1-carboxylate 1-73 (599 mg, 0.948 mmol, 75% yield) as a white solid. LCMS [M+H]⁺: 632.6. ¹H NMR (400 MHz, Chloroform-d) δ 7.98 (d, J = 14.3 Hz, 1H), 7.81 (d, J = 8.4 Hz, 1H), 7.25 (d, J = 8.2 Hz, 2H), 7.03 (dd, J = 8.3, 2.2 Hz, 1H), 6.95 (s, 1H), 6.89 (d, J = 8.4 Hz, 2H), 5.22 (dd, J = 13.2, 5.2 Hz, 1H), 4.46 (d, J = 15.8 Hz, 1H), 4.32 - 4.19 (m, 2H), 4.09 (dd, J = 9.8, 4.8 Hz, 1H), 3.99 (d, J = 13.6 Hz, 1H), 3.63 - 3.53 (m, 4H), 3.39 (d, J = 13.6 Hz, 1H), 3.16 - 3.06 (m, 4H), 2.99 - 2.74 (m, 4H), 2.36 (qd, J = 13.0, 5.0 Hz, 1H), 2.27 - 2.12 (m, 2H), 1.91 - 1.80 (m, 1H), 1.76 - 1.70 (m, 1H), 1.68 - 1.46 (m, 13H).

### Example 3.14: 3-(1-oxo-5-(((R)-1-(4-(piperazin-1-yl)benzyl)piperidin-2-yl)methoxy)isoindolin-2-yl)piperidine-2,6-dione (INT-74)

[chemical structure]

tert-butyl 4-(4-(((2R)-2-(((2-(2,6-dioxopiperidin-3-yl)-1-oxoisoindolin-5-yl)oxy)methyl)piperidin-1-yl)methyl)phenyl)piperazine-1-carboxylate 1-73 (0.599 g, 0.948 mmol) was suspended in dioxane (Volume: 4 mL, Ratio: 1.333) and dissolved in trifluoroethanol (Volume: 3 mL, Ratio: 1.000). 4M HCl in dioxane (1.422 mL, 5.69 mmol) was added and the resulting mixture was stirred at r.t. overnight. The reaction mixture was concentrated to afford slightly impure 3-(1-oxo-5-(((R)-1-(4-(piperazin-1-yl)benzyl)piperidin-2-yl)methoxy)isoindolin-2-yl)piperidine-2,6-dione INT-74 (700 mg, 1.317 mmol) as a pink solid. The crude material was used in the next step without purification. LCMS [M+H]⁺: 532.5.

### Example 3.15: 3-(5-(((R)-1-(4-(4-(oxetan-3-ylmethyl)piperazin-1-yl)benzyl)piperidin-2-yl)methoxy)-1-oxoisoindolin-2-yl)piperidine-2,6-dione (I-76)

[chemical structure]

INT-74 was prepared according to General Method III starting from 3-(1-oxo-5-(((R)-1-(4-(piperazin-1-yl)benzyl)piperidin-2-yl)methoxy)isoindolin-2-yl)piperidine-2,6-dione INT-74 (0.15 g, 0.282 mmol) and oxetane-3-carbaldehyde (49 mg, 0.564 mmol). The crude material was purified by silica gel chromatography (eluting with 0-100% 3:1 ethyl acetate:ethanol with 1% TEA in heptane). Pure fractions were combined, concentrated, and lyophilized to afford 3-(5-(((R)-1-(4-(4-(oxetan-3-ylmethyl)piperazin-1-yl)benzyl)piperidin-2-yl)methoxy)-1-oxoisoindolin-2-yl)piperidine-2,6-dione I-76 (43.17 mg, 0.072 mmol, 25.4 % yield) as a white solid. LCMS [M+H]⁺: 602.3. ¹H NMR (400 MHz, DMSO-d₆) δ 10.90 (s, 1H), 7.54 (d, J= 8.4 Hz, 1H), 7.13 - 7.03 (m, 3H), 6.99 (dd, J = 8.6, 2.2 Hz, 1H), 6.77 (d, J= 8.4 Hz, 2H), 5.00 (dd, J= 13.2, 5.0 Hz, 1H), 4.58 (dd, J= 7.8, 5.8 Hz, 2H), 4.37 - 4.13 (m, 5H), 4.05 (dd, J = 10.3, 5.5 Hz, 1H), 3.81 (d, J= 13.2 Hz, 1H), 3.24 - 3.19 (m, 1H), 3.18 - 3.07 (m, 1H), 3.03 - 2.93 (m, 4H), 2.84 (ddd, J = 17.3, 13.6, 5.4 Hz, 1H), 2.71 - 2.48 (m, 5H), 2.39 - 2.28 (m, 5H), 2.07 - 1.96 (m, 1H), 1.96 - 1.86 (m, 1H), 1.75 - 1.64 (m, 1H), 1.63 - 1.51 (m, 1H), 1.51 - 1.22 (m, 4H).

### Example 3.16: 3-(1-oxo-5-(((R)-pyrrolidin-2-yl)methoxy)isoindolin-2-yl)piperidine-2,6-dione (I-81)

[chemical structure]

### Step 1: Tert-butyl (2R)-2-(((2-(2,6-dioxo-1-((2-(trimethylsilyl)ethoxy)methyl)piperidin-3-yl)-1-oxoisoindolin-5-yl)oxy)methyl)pyrrolidine-1-carboxylate (80)

[0848] Intermediate 80 was prepared according to General Method VI starting from N-Boc-D-prolinol (27 mg, 0.132 mmol) to afford tert-butyl (2R)-2-(((2-(2,6-dioxo-1-((2-(trimethylsilyl)ethoxy)methyl)piperidin-3-yl)-1-oxoisoindolin-5-yl)oxy)methyl)pyrrolidine-1-carboxylate 80. The crude material was carried on to the next step as a solution without workup or purification. LCMS [M+H-156.3 (TMSCH2CH2,tButyl)]⁺: 418.6.

### Step 2: 46: 3-(1-oxo-5-(((R)-pyrrolidin-2-yl)methoxy)isoindolin-2-yl)piperidine-2,6-dione (I-81)

[0849] Compound 1-81 was prepared according to General Method VII starting from tert-butyl (2R)-2-(((2-(2,6-dioxo-1-((2-(trimethylsilyl)ethoxy)methyl)piperidin-3-yl)-1-oxoisoindolin-5-yl)oxy)methyl)pyrrolidine-1-carboxylate 80 (63 mg, 0.110 mmol). The crude material was concentrated and purified by basic mass triggered reverse phase HPLC (eluting with 10-30% ACN in water with 5 mM NH4OH as modifier). Each test-tube contained 3 drops of formic acid prior to sample collection. Pure fractions were combined, concentrated, and lyophilized to afford product as a triethylamine salt. A PL-HCO3 MP SPE column (Polymer Lab (Varian), part # PL3540-C603 (or equivalent); 500 mg prepacked resin in 6 ml tube) was pre-washed with EtOH (5 mL). Product was dissolved in EtOH (3 mL) and filtered through column by applying a small pressure. The column was washed with EtOH (5 mL) and the filtrate was concentrated and lyophilized to afford 3-(1-oxo-5-(((R)-pyrrolidin-2-yl)methoxy)isoindolin-2-yl)piperidine-2,6-dione 1-81 (7.3 mg, 0.021 mmol, 19.09% yield) as a white solid. LCMS [M+H]⁺: 344.3. ¹H NMR (400 MHz, DMSO-d₆) δ 10.93 (s, 1H), 7.63 (d, J = 8.4 Hz, 1H), 7.17 (d, J = 2.2 Hz, 1H), 7.05 (dd, J = 8.3, 2.3 Hz, 1H), 5.07 (dd, J = 13.3, 5.1 Hz, 1H), 4.39 (d, J = 17.1 Hz, 1H), 4.26 (d, J = 17.2 Hz, 1H), 4.05 - 3.92 (m, 2H), 3.54 (p, J = 6.8 Hz, 1H), 2.97 - 2.83 (m, 3H), 2.59 (ddd, J = 17.2, 4.6, 2.2 Hz, 1H), 2.45 - 2.30 (m, 1H), 2.03 - 1.86 (m, 2H), 1.86 - 1.62 (m, 2H), 1.59 - 1.44 (m, 2H).

### Biological Data

### Materials and Methods

### Example 3.17: Quantification of WIZ Protein Levels in HiBit Tag Fusion Protein Assay

[0850] The Hibit system from Promega was used to develop high-throughput and quantitative assays to measure changes in WIZ protein levels in response to compounds, e.g. WIZ degraders. The HiBit tag was derived from a split Nanoluciferase and has the following protein sequence: VSGWRLFKKIS (SEQ ID No: 3208). The complementary fragment of Nanoluciferase (known as LgBit, from Promega), was added to the HiBit tag to form an active Nanoluciferase enzyme whose activity can be precisely measured. In this way, the levels of a fusion protein with the HiBit tag can be quantified in cell lysates.

[0851] Lentiviral vectors, based on the Invitrogen™ pLenti6.2/V5 DEST backbone were constructed that places the HiBit tag upstream of WIZ and expressed the fusion protein from an HSVTK promotor.

[0852] To ensure moderate and consistent expression of the HiBit-WIZ fusion protein across all cells in the population, stable cell lines were constructed from cells harboring a single copy of the construct. Lentivirus packaged with the constructs were made using the ViraPower™ kit from Invitrogen™. 293T cells from ATCC (Catalog number: CRL-3216), were infected with the virus at low multiplicity of infection and selected by 5 µg/mL blasticidin in culture media for 2 weeks.

[0853] The levels of HiBit-WIZ tagged fusion proteins in compound-treated cell lines were measured as follows:

[0854] On day 1, cells were diluted to 1.0 x 10⁶ cells/ml in normal growth medium. 20 µL of cell suspension were plated in each well of a solid white 384-well plate. Plates were incubated overnight in a 37° C. and 5% CO₂ humidified tissue culture incubator.

[0855] On day 2, serial dilutions of compounds were made in 384-well plates. Compound plates were set up with DMSO in columns 1, 2, 23, 24, and 10-point compound dilution series in column 3-12 and column 13-22. 10 mM stock solution of compound were placed into column 3 or 13 and a 1:5 serial dilution was carried out until there was a 10-point dilution series per compound. 50 nL of diluted compounds were transferred into the plated cells by Echo® (Labcyte) acoustic transfer. The highest concentration of compound was 25 µM. Plates were incubated overnight (about 18 hours) in a 37° C. and 5% CO₂ humidified tissue culture incubator.

[0856] On day 3, plates were removed from the incubator and allowed to equilibrate at room temperature for 60 minutes. HiBit substrate (Nano-Glo® HiBit Lytic Detection System, Promega Catalogue number: N3050) was added as described by the manufacturers protocols. Plates were incubated at room temperature for 30 minutes and luminescence was read using an EnVision® reader (PerkinElmer®). Data was analyzed and visualized using the Spotfire® software package.

### WIZ Degradation Activity of Compounds (Table 9)

[0857] Table 9 shows WIZ degradation activity of compounds of the disclosure in the WIZ HiBit assay in 293T cells. WIZ Amax reflects the DMSO-normalized, curve-fitted percentage of WIZ-HiBit remaining at 25 uM. It was calculated by normalizing DMSO controls to 100%, parametric curve fitting of the dose response data (10-point, 5-fold), followed by calculation of response at 25 uM using the fitted equation (nd = not determined).

TABLE 9

| Cmpd No. | WIZ AC₅₀ (µM) | WIZ Amax | % degradation of WIZ (100-Amax) |
|---|---|---|---|
| I-5 | 0.029 | 2.1 | 97.9 |
| I-50 | 0.277 | 9.9 | 90.1 |
| I-50bi | 0.848 | 28.0 | 72.0 |
| I-50bt | 4.268 | 33.9 | 66.1 |
| I-50cn | >25 | 75.7 | 24.3 |
| I-50co | 0.081 | 7.7 | 92.3 |
| I-50dl | >25 | 56.0 | 44.0 |
| I-50ee | 0.287 | 7.6 | 92.4 |
| I-50em | 19.395 | 48.1 | 51.9 |
| I-50bw | 0.150 | 4.0 | 96.0 |
| I-52 | 2.125 | 30.4 | 69.6 |
| I-53 | 1.085 | 20.4 | 79.6 |
| I-58 | >25 | 73.9 | 26.1 |
| 1-60 | 2.036 | 32.7 | 67.3 |
| 1-81 | >25 | 58.9 | 41.1 |

### Example 3.18: Small Molecule HbF Induction Assay

[0858] Cryopreserved primary human CD34⁺ hematopoietic stem and progenitor cells were obtained from AllCells, LLC. The CD34⁺ cells were isolated from the peripheral blood of healthy donors after mobilization by administration of granulocyte colony-stimulating factor. Cells were differentiated ex vivo toward the erythroid lineage using a 2-phase culture method. In the first phase, cells were cultured in StemSpan™ Serum-Free Expansion Media (SFEM) (STEMCELL Technologies Inc.) supplemented with rhSCF (50 ng/mL, Peprotech®, Inc.), rhIL-6 (50 ng/mL, Peprotech®, Inc.), rhIL-3 (50 ng/mL, Peprotech®, Inc.), and rhFlt3L (50 ng/mL, Peprotech®, Inc.), and 1X antibiotic-antimycotic (Life Technologies, Thermo Fisher Scientific) for 6 days at 37° C. with 5% CO₂. During the second phase, cells were cultured in erythroid differentiation media at 5,000 cells/mL in the presence of compound for 7 days at 37° C. with 5% CO₂. Erythroid Differentiation Media is comprised of IMDM (Life Technologies) supplemented with insulin (10 µg/mL, Sigma Aldrich), heparin (2 U/mL Sigma Aldrich), holo-transferrin (330 µg/mL, Sigma Aldrich), human serum AB (5%, Sigma Aldrich), hydrocortisone (1 µM, STEMCELL Technologies), rhSCF (100 ng/mL, Peprotech®, Inc.), rhIL-3 (5 ng/mL, Peprotech®, Inc.), rhEPO (3 U/mL, Peprotech®, Inc.), and 1X antibiotic- antimycotic. All compounds were dissolved and diluted into dimethylsulfoxide (DMSO) and were added to culture media for a final concentration of 0.3% DMSO for testing in a 7-point, 1:3 dilution series starting at 30 uM.

### Staining and Flow Cytometry

[0859] For viability analysis, samples were washed and resuspended in phosphate-buffered saline (PBS) and stained with LIVE/DEAD™ Fixable Violet Dead Cell Stain Kit (Life Technologies, L34963) for 20 minutes. Cells were then washed again with PBS and resuspended in PBS supplemented with 2% fetal bovine serum (FBS), and 2 mM EDTA to prepare for cell surface marker analysis. Cells were labeled with allophycocyanin-conjugated CD235a (1:100, BD Biosciences, 551336) and Brilliant Violetconjugated CD71 (1:100, BD Biosciences, 563767) antibodies for 20 minutes. For analysis of cytoplasmic Fetal Hemoglobin (HbF), cells were fixed and permeabilized using the Fixation (BioLegend®, 420801) and Permeabilization Wash (BioLegend®, 421002) Buffers according to the manufacturer’s protocol. During the permeabilization step, cells were stained with phycoerythrinconjugated or FITC-conjugated HbF-specific antibody (1:10-1:25, Invitrogen™, MHFH04-4) for 30 minutes. Stained cells were washed with phosphate-buffered saline before analysis on the FACSCanto™ II flow cytometer or LSRFortessa™ (BD Biosciences). Data analysis was performed with FlowJo™ Software (BD Biosciences).

### HbF Induction Activity of Compounds (Table 10)

[0860] mPB CD34+ cells were expanded for 6 days, then erythroid differentiated in the presence of compound for 7 days. Cells were fixed, stained and analyzed by flow cytometry. Table 10 shows HbF induction activity of the compounds. HbF Amax = the highest percentage of cells staining positive for HbF (%HbF+ cells) in the fitted dose-response curve. The baseline %HbF+ cells for DMSO-treated cells is approximately 30-40%.

TABLE 10

| Cmpd no. | HbF AC₅₀(µM) | HbF Amax | Cmpd no. | HbF AC₅₀(µM) | HbF Amax |
|---|---|---|---|---|---|
| I-5 | 0.080 | 78.3 | I-50dl | 0.730 | 82.6 |
| 1-47 | 4.163 | 77.1 | I-50ee | >30 | 56.0 |
| 1-49 | 0.542 | 69.3 | I-50em | 0.045 | 90.5 |
| I-50 | 9.436 | 68.2 | I-52 | >30 | 45.5 |
| I-50bi | >30 | 48.1 | I-53 | 0.122 | 78.1 |
| I-50bt | >30 | 39.3 | I-58 | >30 | 39.2 |
| I-50cn | >30 | 33.9 | 1-60 | 0.864 | 80.6 |
| I-50co | >30 | 66.8 | 1-81 | >30 | 54.3 |

TABLE 1

| SEQ ID NO | target_gene_id | target_symbol | target_region name | target_region_coordinates | gRNA_target_site_coordinates | gRNA Targeting Domain | strand |
|---|---|---|---|---|---|---|---|
| 1 | 58525 | WIZ | promoter | chr19:15449951-15451624 | chr19:15451586-15451605 | AAGAAUUGGCAAUUCUUAGU | + |
| 2 | 58525 | WIZ | promoter | chr19:15449951-15451624 | chr19:15451585-15451604 | UAAGAAUUGGCAAUUCUUAG | + |
| 3 | 58525 | WIZ | promoter | chr19:15449951-15451624 | chr19:15451554-15451573 | AGAGAUGAAUAGGGCUUGCG | + |
| 4 | 58525 | WIZ | promoter | chr19:15449951-15451624 | chr19:15451553-15451572 | GAGAGAUGAAUAGGGCUUGC | + |
| 5 | 58525 | WIZ | promoter | chr19:15449951-15451624 | chr19:15451531-15451550 | UUCUAAUUAGGGGAGAAUUU | + |
| 6 | 58525 | WIZ | promoter | chr19:15449951-15451624 | chr19:15451521-15451540 | UCCAUGAGACUUCUAAUUAG | + |
| 7 | 58525 | WIZ | promoter | chr19:15449951-15451624 | chr19:15451520-15451539 | CUCCAUGAGACUUCUAAUUA | + |
| 8 | 58525 | WIZ | promoter | chr19:15449951-15451624 | chr19:15451519-15451538 | UCUCCAUGAGACUUCUAAUU | + |
| 9 | 58525 | WIZ | promoter | chr19:15449951-15451624 | chr19:15451493-15451512 | CUGGUGAGAACUUGUGUACA | + |
| 10 | 58525 | WIZ | promoter | chr19:15449951-15451624 | chr19:15451403-15451422 | AUGGGUCCUCUCACUGUGUA | + |
| 11 | 58525 | WIZ | promoter | chr19:15449951-15451624 | chr19:15451402-15451421 | UAUGGGUCCUCUCACUGUGU | + |
| 12 | 58525 | WIZ | promoter | chr19:15449951-15451624 | chr19:15451385-15451404 | UAUCGAAUGCCUUUAACUAU | + |
| 13 | 58525 | WIZ | promoter | chr19:15449951-15451624 | chr19:15451384-15451403 | UUAUCGAAUGCCUUUAACUA | + |
| 14 | 58525 | WIZ | promoter | chr19:15449951-15451624 | chr19:15451397-15451416 | GUGAGAGGACCCAUAGUUAA | - |
| 15 | 58525 | WIZ | promoter | chr19:15449951-15451624 | chr19:15451364-15451383 | AAGGUAUUCACCAUUGUUAU | - |
| 16 | 58525 | WIZ | promoter | chr19:15449951-15451624 | chr19:15451308-15451327 | GAUUGGGAGGUUGCCAGGGG | + |
| 17 | 58525 | WIZ | promoter | chr19:15449951-15451624 | chr19:15451303-15451322 | UGUGGGAUUGGGAGGUUGCC | + |
| 18 | 58525 | WIZ | promoter | chr19:15449951-15451624 | chr19:15451291-15451310 | AGAUGCUCUCACUGUGGGAU | + |
| 19 | 58525 | WIZ | promoter | chr19:15449951-15451624 | chr19:15451285-15451304 | CUAGGAAGAUGCUCUCACUG | + |
| 20 | 58525 | WIZ | promoter | chr19:15449951-15451624 | chr19:15451270-15451289 | CCUAGGCCCUCCUCAUGUCA | - |
| 21 | 58525 | WIZ | promoter | chr19:15449951-15451624 | chr19:15451267-15451286 | AGGCCCUCCUCAUGUCACGG | - |
| 22 | 58525 | WIZ | promoter | chr19:15449951-15451624 | chr19:15451261-15451280 | UCCUCAUGUCACGGAGGCCA | - |
| 23 | 58525 | WIZ | promoter | chr19:15449951-15451624 | chr19:15451260-15451279 | CCUCAUGUCACGGAGGCCAU | - |
| 24 | 58525 | WIZ | promoter | chr19:15449951-15451624 | chr19:15451156-15451175 | CAAAUCAUGGGUGAGUGGAU | - |
| 25 | 58525 | WIZ | promoter | chr19:15449951-15451624 | chr19:15451102-15451121 | ACGGAUAGGUUAGCAUUUGC | - |
| 26 | 58525 | WIZ | promoter | chr19:15449951-15451624 | chr19:15451074-15451093 | UGACCUGGUAGGUGAGUAGC | - |
| 27 | 58525 | WIZ | promoter | chr19:15449951-15451624 | chr19:15451053-15451072 | GGGUAGUUGGUUAACCAGGU | - |
| 28 | 58525 | WIZ | promoter | chr19:15449951-15451624 | chr19:15451052-15451071 | GGUAGUUGGUUAACCAGGUU | - |
| 29 | 58525 | WIZ | promoter | chr19:15449951-15451624 | chr19:15451036-15451055 | CUAGGCAGACAUACCCAACC | + |
| 30 | 58525 | WIZ | promoter | chr19:15449951-15451624 | chr19:15451028-15451047 | AUGUCUGCCUAGAAAAGGCC | - |
| 31 | 58525 | WIZ | promoter | chr19:15449951-15451624 | chr19:15450934-15450953 | GCCCAGUUCUCAGGCGUCUC | + |
| 32 | 58525 | WIZ | promoter | chr19:15449951-15451624 | chr19:15450844-15450863 | CACCAGUUUGUCUGUUGAUU | + |
| 33 | 58525 | WIZ | promoter | chr19:15449951-15451624 | chr19:15450807-15450826 | CUGGGCGGAAAGAUGUGUGU | - |
| 34 | 58525 | WIZ | promoter | chr19:15449951-15451624 | chr19:15450743-15450762 | UUACUUGGGUGCUGGAUGAA | - |
| 35 | 58525 | WIZ | promoter | chr19:15449951-15451624 | chr19:15450706-15450725 | AGUGAAUGGGUGGGUUGAGU | - |
| 36 | 58525 | WIZ | promoter | chr19:15449951-15451624 | chr19:15450582-15450601 | UAGCUAGGUGGUUAGAUAUC | - |
| 37 | 58525 | WIZ | promoter | chr19:15449951-15451624 | chr19:15450574-15450593 | UGGUUAGAUAUCUGGAUACA | - |
| 38 | 58525 | WIZ | promoter | chr19:15449951-15451624 | chr19:15450571-15450590 | UUAGAUAUCUGGAUACAUGG | - |
| 39 | 58525 | WIZ | promoter | chr19:15449951-15451624 | chr19:15450553-15450572 | GGUGGAUAAGACAAGACAAC | - |
| 40 | 58525 | WIZ | promoter | chr19:15449951-15451624 | chr19:15450532-15450551 | GGCCAUGAUGUGUGUCUGAU | - |
| 41 | 58525 | WIZ | promoter | chr19:15449951-15451624 | chr19:15450531-15450550 | GCCAUGAUGUGUGUCUGAUG | - |
| 42 | 58525 | WIZ | promoter | chr19:15449951-15451624 | chr19:15450506-15450525 | GUCCUGGAAGCUGUGAUCCU | - |
| 43 | 58525 | WIZ | promoter | chr19:15449951-15451624 | chr19:15450481-15450500 | CUGGGUGGAGAAGGUGACUU | - |
| 44 | 58525 | WIZ | promoter | chr19:15449951-15451624 | chr19:15450467-15450486 | UGACUUAGGACUGAAGACCU | - |
| 45 | 58525 | WIZ | promoter | chr19:15449951-15451624 | chr19:15450447-15450466 | CAUGUCCCUAGAGUUGCCCU | + |
| 46 | 58525 | WIZ | promoter | chr19:15449951-15451624 | chr19:15450456-15450475 | UGAAGACCUAGGGCAACUCU | - |
| 47 | 58525 | WIZ | promoter | chr19:15449951-15451624 | chr19:15450455-15450474 | GAAGACCUAGGGCAACUCUA | - |
| 48 | 58525 | WIZ | promoter | chr19:15449951-15451624 | chr19:15450449-15450468 | CUAGGGCAACUCUAGGGACA | - |
| 49 | 58525 | WIZ | promoter | chr19:15449951-15451624 | chr19:15450446-15450465 | GGGCAACUCUAGGGACAUGG | - |
| 50 | 58525 | WIZ | promoter | chr19:15449951-15451624 | chr19:15450420-15450439 | UGAAGUCCAGUGUGGAUGAU | - |
| 51 | 58525 | WIZ | promoter | chr19:15449951-15451624 | chr19:15450377-15450396 | GGUUGGAAGGUAGCUGAUGG | - |
| 52 | 58525 | WIZ | promoter | chr19:15449951-15451624 | chr19:15450343-15450362 | AAGGCUAAAAAUUGGCUGGG | - |
| 53 | 58525 | WIZ | promoter | chr19:15449951-15451624 | chr19:15450294-15450313 | UUCCCCCAUGGGUCAUUGAU | + |
| 54 | 58525 | WIZ | promoter | chr19:15449951-15451624 | chr19:15450293-15450312 | GUUCCCCCAUGGGUCAUUGA | + |
| 55 | 58525 | WIZ | promoter | chr19:15449951-15451624 | chr19:15450283-15450302 | GUGCAGAGAAGUUCCCCCAU | + |
| 56 | 58525 | WIZ | promoter | chr19:15449951-15451624 | chr19:15450261-15450280 | AAGCACUAAAAGAGUGGGGA | + |
| 57 | 58525 | WIZ | promoter | chr19:15449951-15451624 | chr19:15450256-15450275 | GCUAAAAGCACUAAAAGAGU | + |
| 58 | 58525 | WIZ | promoter | chr19:15449951-15451624 | chr19:15450255-15450274 | CGCUAAAAGCACUAAAAGAG | + |
| 59 | 58525 | WIZ | promoter | chr19:15449951-15451624 | chr19:15450245-15450264 | GCUUUUAGCGAGCCUACCAU | - |
| 60 | 58525 | WIZ | promoter | chr19:15449951-15451624 | chr19:15450230-15450249 | CCACUGGUACUUCCAAUGGU | + |
| 61 | 58525 | WIZ | promoter | chr19:15449951-15451624 | chr19:15450226-15450245 | CGUCCCACUGGUACUUCCAA | + |
| 62 | 58525 | WIZ | promoter | chr19:15449951-15451624 | chr19:15450233-15450252 | CCUACCAUUGGAAGUACCAG | - |
| 63 | 58525 | WIZ | promoter | chr19:15449951-15451624 | chr19:15450232-15450251 | CUACCAUUGGAAGUACCAGU | - |
| 64 | 58525 | WIZ | promoter | chr19:15449951-15451624 | chr19:15450214-15450233 | AUGGCUCCUUAUCGUCCCAC | + |
| 65 | 58525 | WIZ | promoter | chr19:15449951-15451624 | chr19:15450223-15450242 | GAAGUACCAGUGGGACGAUA | - |
| 66 | 58525 | WIZ | promoter | chr19:15449951-15451624 | chr19:15450213-15450232 | UGGGACGAUAAGGAGCCAUU | - |
| 67 | 58525 | WIZ | promoter | chr19:15449951-15451624 | chr19:15450212-15450231 | GGGACGAUAAGGAGCCAUUG | - |
| 68 | 58525 | WIZ | promoter | chr19:15449951-15451624 | chr19:15450195-15450214 | CUUGUCGUCCCACACCCCAA | + |
| 69 | 58525 | WIZ | promoter | chr19:15449951-15451624 | chr19:15450197-15450216 | CAUUGGGGUGUGGGACGACA | - |
| 70 | 58525 | WIZ | promoter | chr19:15449951-15451624 | chr19:15450196-15450215 | AUUGGGGUGUGGGACGACAA | - |
| 71 | 58525 | WIZ | promoter | chr19:15449951-15451624 | chr19:15450185-15450204 | GGACGACAAGGGUGUUGUCA | - |
| 72 | 58525 | WIZ | promoter | chr19:15449951-15451624 | chr19:15450177-15450196 | AGGGUGUUGUCAUGGUAACG | - |
| 73 | 58525 | WIZ | promoter | chr19:15449951-15451624 | chr19:15450166-15450185 | AUGGUAACGGGGCCUCUCCC | - |
| 74 | 58525 | WIZ | promoter | chr19:15449951-15451624 | chr19:15450151-15450170 | CACGGCCUGAGUCCAGGGAG | + |
| 75 | 58525 | WIZ | promoter | chr19:15449951-15451624 | chr19:15450151-15450170 | CUCCCUGGACUCAGGCCGUG | - |
| 76 | 58525 | WIZ | promoter | chr19:15449951-15451624 | chr19:15450133-15450152 | UCACCCUUAAAGGGCCCGCA | + |
| 77 | 58525 | WIZ | promoter | chr19:15449951-15451624 | chr19:15450109-15450128 | CCAUGUUGGGAGUGGCCAAG | + |
| 78 | 58525 | WIZ | promoter | chr19:15449951-15451624 | chr19:15450096-15450115 | AGCGGGCGCGCCGCCAUGUU | + |
| 79 | 58525 | WIZ | promoter | chr19:15449951-15451624 | chr19:15450095-15450114 | CAGCGGGCGCGCCGCCAUGU | + |
| 80 | 58525 | WIZ | promoter | chr19:15449951-15451624 | chr19:15450109-15450128 | CUUGGCCACUCCCAACAUGG | - |
| 81 | 58525 | WIZ | promoter | chr19:15449951-15451624 | chr19:15450097-15450116 | CAACAUGGCGGCGCGCCCGC | - |
| 82 | 58525 | WIZ | promoter | chr19:15449951-15451624 | chr19:15450022-15450041 | CGCCAUGAUGGGGAGGUCCG | + |
| 83 | 58525 | WIZ | promoter | chr19:15449951-15451624 | chr19:15450021-15450040 | CCGCCAUGAUGGGGAGGUCC | + |
| 84 | 58525 | WIZ | promoter | chr19:15449951-15451624 | chr19:15450020-15450039 | GCCGCCAUGAUGGGGAGGUC | + |
| 85 | 58525 | WIZ | promoter | chr19:15449951-15451624 | chr19:15450027-15450046 | CGCCCCGGACCUCCCCAUCA | - |
| 86 | 58525 | WIZ | promoter | chr19:15449951-15451624 | chr19:15450012-15450031 | CCCGCCGCGCCGCCAUGAUG | + |
| 87 | 58525 | WIZ | promoter | chr19:15449951-15451624 | chr19:15450024-15450043 | CCCGGACCUCCCCAUCAUGG | - |
| 88 | 58525 | WIZ | promoter | chr19:15449951-15451624 | chr19:15450016-15450035 | UCCCCAUCAUGGCGGCGCGG | - |
| 89 | 58525 | WIZ | promoter | chr19:15449951-15451624 | chr19:15450015-15450034 | CCCCAUCAUGGCGGCGCGGC | - |
| 90 | 58525 | WIZ | promoter | chr19:15449951-15451624 | chr19:15449994-15450013 | GGGCUGUCGCGCUGAGGUCA | - |
| 91 | 58525 | WIZ | promoter | chr19:15449951-15451624 | chr19:15449991-15450010 | CUGUCGCGCUGAGGUCACGG | - |
| 92 | 58525 | WIZ | promoter | chr19:15449951-15451624 | chr19:15449982-15450001 | UGAGGUCACGGCGGCGCGCC | - |
| 93 | 58525 | WIZ | promoter | chr19:15449951-15451624 | chr19:15449981-15450000 | GAGGUCACGGCGGCGCGCCG | - |
| 94 | 58525 | WIZ | promoter | chr19:15449951-15451624 | chr19:15449980-15449999 | AGGUCACGGCGGCGCGCCGG | - |
| 95 | 58525 | WIZ | promoter | chr19:15449951-15451624 | chr19:15449979-15449998 | GGUCACGGCGGCGCGCCGGG | - |
| 96 | 58525 | WIZ | promoter | chr19:15449951-15451624 | chr19:15449978-15449997 | GUCACGGCGGCGCGCCGGGG | - |
| 97 | 58525 | WIZ | promoter | chr19:15449951-15451624 | chr19:15449950-15449969 | CGGCGGGGGGAGCGAUUUAA | - |
| 98 | 58525 | WIZ | promoter | chr19:15449951-15451624 | chr19:15449949-15449968 | GGCGGGGGGAGCGAUUUAAA | - |
| 99 | 58525 | WIZ | exon_01_nc | chr19:15449797-15449951 | chr19:15449881-15449900 | CGCUCCCGGUGCCGGUGCCG | + |
| 100 | 58525 | WIZ | exon_01_nc | chr19:15449797-15449951 | chr19:15449833-15449852 | CGGAGCUCCCCUCCUUGGUG | + |
| 101 | 58525 | WIZ | intron_01 | chr19:15449608-15449797 | chr19:15449759-15449778 | GCCCCACCCGCGGGCUCCCC | + |
| 102 | 58525 | WIZ | intron_01 | chr19:15449608-15449797 | chr19:15449749-15449768 | CUACGGCUCCGCCCCACCCG | + |
| 103 | 58525 | WIZ | intron_01 | chr19:15449608-15449797 | chr19:15449732-15449751 | GGGCCUCCCCCGCCCCGCUA | + |
| 104 | 58525 | WIZ | intron_01 | chr19:15449608-15449797 | chr19:15449700-15449719 | CCGGGGGGUCCCGCCUGGCC | + |
| 105 | 58525 | WIZ | exon_02_nc | chr19:15449466-15449608 | chr19:15449584-15449603 | CGGGACGCGCCGAGGUAGGG | + |
| 106 | 58525 | WIZ | exon_02_nc | chr19:15449466-15449608 | chr19:15449583-15449602 | GCGGGACGCGCCGAGGUAGG | + |
| 107 | 58525 | WIZ | exon_02_nc | chr19:15449466-15449608 | chr19:15449582-15449601 | CGCGGGACGCGCCGAGGUAG | + |
| 108 | 58525 | WIZ | exon_02_nc | chr19:15449466-15449608 | chr19:15449581-15449600 | CCGCGGGACGCGCCGAGGUA | + |
| 109 | 58525 | WIZ | exon_02_nc | chr19:15449466-15449608 | chr19:15449580-15449599 | CCCGCGGGACGCGCCGAGGU | + |
| 110 | 58525 | WIZ | exon_02_nc | chr19:15449466-15449608 | chr19:15449576-15449595 | AGACCCCGCGGGACGCGCCG | + |
| 111 | 58525 | WIZ | exon_02_nc | chr19:15449466-15449608 | chr19:15449584-15449603 | CCCUACCUCGGCGCGUCCCG | - |
| 112 | 58525 | WIZ | exon_02_nc | chr19:15449466-15449608 | chr19:15449582-15449601 | CUACCUCGGCGCGUCCCGCG | - |
| 113 | 58525 | WIZ | exon_02_nc | chr19:15449466-15449608 | chr19:15449565-15449584 | CCCGGGGCAGGAGACCCCGC | + |
| 114 | 58525 | WIZ | exon_02_nc | chr19:15449466-15449608 | chr19:15449569-15449588 | UCCCGCGGGGUCUCCUGCCC | - |
| 115 | 58525 | WIZ | exon_02_nc | chr19:15449466-15449608 | chr19:15449548-15449567 | GCCCUCCGCCCGUGCACCCC | + |
| 116 | 58525 | WIZ | exon_02_nc | chr19:15449466-15449608 | chr19:15449547-15449566 | AGCCCUCCGCCCGUGCACCC | + |
| 117 | 58525 | WIZ | exon_02_nc | chr19:15449466-15449608 | chr19:15449552-15449571 | CCCCGGGGUGCACGGGCGGA | - |
| 118 | 58525 | WIZ | exon_02_nc | chr19:15449466-15449608 | chr19:15449521-15449540 | CUCGGGGGUCCAGGGUCCGG | + |
| 119 | 58525 | WIZ | exon_02_nc | chr19:15449466-15449608 | chr19:15449520-15449539 | CCUCGGGGGUCCAGGGUCCG | + |
| 120 | 58525 | WIZ | exon_02_nc | chr19:15449466-15449608 | chr19:15449533-15449552 | AGGGCUCAUCCCCCGGACCC | - |
| 121 | 58525 | WIZ | exon_02_nc | chr19:15449466-15449608 | chr19:15449513-15449532 | GCCCACUCCUCGGGGGUCCA | + |
| 122 | 58525 | WIZ | exon_02_nc | chr19:15449466-15449608 | chr19:15449512-15449531 | GGCCCACUCCUCGGGGGUCC | + |
| 123 | 58525 | WIZ | exon_02_nc | chr19:15449466-15449608 | chr19:15449523-15449542 | CCCCGGACCCUGGACCCCCG | - |
| 124 | 58525 | WIZ | exon_02_nc | chr19:15449466-15449608 | chr19:15449506-15449525 | CGCGCGGGCCCACUCCUCGG | + |
| 125 | 58525 | WIZ | exon_02_nc | chr19:15449466-15449608 | chr19:15449505-15449524 | CCGCGCGGGCCCACUCCUCG | + |
| 126 | 58525 | WIZ | exon_02_nc | chr19:15449466-15449608 | chr19:15449517-15449536 | ACCCUGGACCCCCGAGGAGU | - |
| 127 | 58525 | WIZ | exon_02_nc | chr19:15449466-15449608 | chr19:15449508-15449527 | CCCCGAGGAGUGGGCCCGCG | - |
| 128 | 58525 | WIZ | exon_02_nc | chr19:15449466-15449608 | chr19:15449491-15449510 | AGGUGGGGGCUGCGCCGCGC | + |
| 129 | 58525 | WIZ | exon_02_nc | chr19:15449466-15449608 | chr19:15449476-15449495 | CCCCAGGGGUCGCAGAGGUG | + |
| 130 | 58525 | WIZ | exon_02_nc | chr19:15449466-15449608 | chr19:15449475-15449494 | CCCCCAGGGGUCGCAGAGGU | + |
| 131 | 58525 | WIZ | exon_02_nc | chr19:15449466-15449608 | chr19:15449471-15449490 | ACGCCCCCCAGGGGUCGCAG | + |
| 132 | 58525 | WIZ | exon_02_nc | chr19:15449466-15449608 | chr19:15449479-15449498 | CCCCACCUCUGCGACCCCUG | - |
| 133 | 58525 | WIZ | exon_02_nc | chr19:15449466-15449608 | chr19:15449477-15449496 | CCACCUCUGCGACCCCUGGG | - |
| 134 | 58525 | WIZ | exon_02_nc | chr19:15449466-15449608 | chr19:15449462-15449481 | CCUACCCGGACGCCCCCCAG | + |
| 135 | 58525 | WIZ | exon_02_nc | chr19:15449466-15449608 | chr19:15449460-15449479 | CUCCUACCCGGACGCCCCCC | + |
| 136 | 58525 | WIZ | exon_02_nc | chr19:15449466-15449608 | chr19:15449470-15449489 | UGCGACCCCUGGGGGGCGUC | - |
| 137 | 58525 | WIZ | intron_02 | chr19:15448367-15449466 | chr19:15449431-15449450 | CGGAGCACUUUGGCAGCGUG | + |
| 138 | 58525 | WIZ | intron_02 | chr19:15448367-15449466 | chr19:15449430-15449449 | UCGGAGCACUUUGGCAGCGU | + |
| 139 | 58525 | WIZ | intron_02 | chr19:15448367-15449466 | chr19:15449429-15449448 | UUCGGAGCACUUUGGCAGCG | + |
| 140 | 58525 | WIZ | intron_02 | chr19:15448367-15449466 | chr19:15449421-15449440 | ACCGCAACUUCGGAGCACUU | + |
| 141 | 58525 | WIZ | intron_02 | chr19:15448367-15449466 | chr19:15449411-15449430 | AACGGGCGGGACCGCAACUU | + |
| 142 | 58525 | WIZ | intron_02 | chr19:15448367-15449466 | chr19:15449425-15449444 | GCCAAAGUGCUCCGAAGUUG | - |
| 143 | 58525 | WIZ | intron_02 | chr19:15448367-15449466 | chr19:15449398-15449417 | ACUGCCCGCGGGGAACGGGC | + |
| 144 | 58525 | WIZ | intron_02 | chr19:15448367-15449466 | chr19:15449397-15449416 | CACUGCCCGCGGGGAACGGG | + |
| 145 | 58525 | WIZ | intron_02 | chr19:15448367-15449466 | chr19:15449394-15449413 | GGGCACUGCCCGCGGGGAAC | + |
| 146 | 58525 | WIZ | intron_02 | chr19:15448367-15449466 | chr19:15449393-15449412 | UGGGCACUGCCCGCGGGGAA | + |
| 147 | 58525 | WIZ | intron_02 | chr19:15448367-15449466 | chr19:15449387-15449406 | ACUGGGUGGGCACUGCCCGC | + |
| 148 | 58525 | WIZ | intron_02 | chr19:15448367-15449466 | chr19:15449374-15449393 | CCUGCGGUUGUCCACUGGGU | + |
| 149 | 58525 | WIZ | intron_02 | chr19:15448367-15449466 | chr19:15449373-15449392 | ACCUGCGGUUGUCCACUGGG | + |
| 150 | 58525 | WIZ | intron_02 | chr19:15448367-15449466 | chr19:15449370-15449389 | AGCACCUGCGGUUGUCCACU | + |
| 151 | 58525 | WIZ | intron_02 | chr19:15448367-15449466 | chr19:15449369-15449388 | AAGCACCUGCGGUUGUCCAC | + |
| 152 | 58525 | WIZ | intron_02 | chr19:15448367-15449466 | chr19:15449377-15449396 | CCCACCCAGUGGACAACCGC | - |
| 153 | 58525 | WIZ | intron_02 | chr19:15448367-15449466 | chr19:15449365-15449384 | ACAACCGCAGGUGCUUCCUC | - |
| 154 | 58525 | WIZ | intron_02 | chr19:15448367-15449466 | chr19:15449364-15449383 | CAACCGCAGGUGCUUCCUCC | - |
| 155 | 58525 | WIZ | intron_02 | chr19:15448367-15449466 | chr19:15449346-15449365 | GGGUCCCUACCCAGGCCCGG | + |
| 156 | 58525 | WIZ | intron_02 | chr19:15448367-15449466 | chr19:15449343-15449362 | UGGGGGUCCCUACCCAGGCC | + |
| 157 | 58525 | WIZ | intron_02 | chr19:15448367-15449466 | chr19:15449338-15449357 | CUUGGUGGGGGUCCCUACCC | + |
| 158 | 58525 | WIZ | intron_02 | chr19:15448367-15449466 | chr19:15449325-15449344 | GUGGGCUGGCAGUCUUGGUG | + |
| 159 | 58525 | WIZ | intron_02 | chr19:15448367-15449466 | chr19:15449324-15449343 | CGUGGGCUGGCAGUCUUGGU | + |
| 160 | 58525 | WIZ | intron_02 | chr19:15448367-15449466 | chr19:15449306-15449325 | AUUCCCAGGGGGCUCCUCCG | + |
| 161 | 58525 | WIZ | intron_02 | chr19:15448367-15449466 | chr19:15449293-15449312 | CGGGGGCCUGGGGAUUCCCA | + |
| 162 | 58525 | WIZ | intron_02 | chr19:15448367-15449466 | chr19:15449292-15449311 | UCGGGGGCCUGGGGAUUCCC | + |
| 163 | 58525 | WIZ | intron_02 | chr19:15448367-15449466 | chr19:15449292-15449311 | GGGAAUCCCCAGGCCCCCGA | - |
| 164 | 58525 | WIZ | intron_02 | chr19:15448367-15449466 | chr19:15449276-15449295 | GUUGCAGGCGCUGCCCUCGG | + |
| 165 | 58525 | WIZ | intron_02 | chr19:15448367-15449466 | chr19:15449275-15449294 | CGAGGGCAGCGCCUGCAACC | - |
| 166 | 58525 | WIZ | intron_02 | chr19:15448367-15449466 | chr19:15449235-15449254 | CGGGCCCAGGCAACCGGGGC | + |
| 167 | 58525 | WIZ | intron_02 | chr19:15448367-15449466 | chr19:15449234-15449253 | CCGGGCCCAGGCAACCGGGG | + |
| 168 | 58525 | WIZ | intron_02 | chr19:15448367-15449466 | chr19:15449197-15449216 | GGAAUGAGGCGCCCUCCCCA | + |
| 169 | 58525 | WIZ | intron_02 | chr19:15448367-15449466 | chr19:15449176-15449195 | AACGGCGGAAAGUGAAGGGC | + |
| 170 | 58525 | WIZ | intron_02 | chr19:15448367-15449466 | chr19:15449172-15449191 | AGGUAACGGCGGAAAGUGAA | + |
| 171 | 58525 | WIZ | intron_02 | chr19:15448367-15449466 | chr19:15449171-15449190 | AAGGUAACGGCGGAAAGUGA | + |
| 172 | 58525 | WIZ | intron_02 | chr19:15448367-15449466 | chr19:15449161-15449180 | AAAUACCUUCAAGGUAACGG | + |
| 173 | 58525 | WIZ | intron_02 | chr19:15448367-15449466 | chr19:15449158-15449177 | UAUAAAUACCUUCAAGGUAA | + |
| 174 | 58525 | WIZ | intron_02 | chr19:15448367-15449466 | chr19:15449169-15449188 | ACUUUCCGCCGUUACCUUGA | - |
| 175 | 58525 | WIZ | intron_02 | chr19:15448367-15449466 | chr19:15449151-15449170 | GAAGGUAUUUAUAGGUAGAG | - |
| 176 | 58525 | WIZ | intron_02 | chr19:15448367-15449466 | chr19:15449119-15449138 | AAAUGAGGACCCUGGGGAGC | + |
| 177 | 58525 | WIZ | intron_02 | chr19:15448367-15449466 | chr19:15449132-15449151 | GAGGACAACCCCCGCUCCCC | - |
| 178 | 58525 | WIZ | intron_02 | chr19:15448367-15449466 | chr19:15449104-15449123 | GGGCUCCUGGUCCAGAAAUG | + |
| 179 | 58525 | WIZ | intron_02 | chr19:15448367-15449466 | chr19:15449112-15449131 | AGGGUCCUCAUUUCUGGACC | - |
| 180 | 58525 | WIZ | intron_02 | chr19:15448367-15449466 | chr19:15449084-15449103 | UCGGGCGAAAGAAAACGAUA | + |
| 181 | 58525 | WIZ | intron_02 | chr19:15448367-15449466 | chr19:15449083-15449102 | CUCGGGCGAAAGAAAACGAU | + |
| 182 | 58525 | WIZ | intron_02 | chr19:15448367-15449466 | chr19:15449085-15449104 | CUAUCGUUUUCUUUCGCCCG | - |
| 183 | 58525 | WIZ | intron_02 | chr19:15448367-15449466 | chr19:15449066-15449085 | CCAAGAUUGCUCUAGUCCUC | + |
| 184 | 58525 | WIZ | intron_02 | chr19:15448367-15449466 | chr19:15449065-15449084 | ACCAAGAUUGCUCUAGUCCU | + |
| 185 | 58525 | WIZ | intron_02 | chr19:15448367-15449466 | chr19:15449069-15449088 | CCCGAGGACUAGAGCAAUCU | - |
| 186 | 58525 | WIZ | intron_02 | chr19:15448367-15449466 | chr19:15449065-15449084 | AGGACUAGAGCAAUCUUGGU | - |
| 187 | 58525 | WIZ | intron_02 | chr19:15448367-15449466 | chr19:15449064-15449083 | GGACUAGAGCAAUCUUGGUU | - |
| 188 | 58525 | WIZ | intron_02 | chr19:15448367-15449466 | chr19:15449061-15449080 | CUAGAGCAAUCUUGGUUGGG | - |
| 189 | 58525 | WIZ | intron_02 | chr19:15448367-15449466 | chr19:15449011-15449030 | GUAUGCAUGAGGGAUAAUGU | - |
| 190 | 58525 | WIZ | intron_02 | chr19:15448367-15449466 | chr19:15448997-15449016 | UAAUGUUGGGGAGAAGCGAA | - |
| 191 | 58525 | WIZ | intron_02 | chr19:15448367-15449466 | chr19:15448985-15449004 | GAAGCGAAAGGGUUAAUGCU | - |
| 192 | 58525 | WIZ | intron_02 | chr19:15448367-15449466 | chr19:15448984-15449003 | AAGCGAAAGGGUUAAUGCUG | - |
| 193 | 58525 | WIZ | intron_02 | chr19:15448367-15449466 | chr19:15448974-15448993 | GUUAAUGCUGGGGUCACUUG | - |
| 194 | 58525 | WIZ | intron_02 | chr19:15448367-15449466 | chr19:15448962-15448981 | GUCACUUGAGGCUGUGUGUG | - |
| 195 | 58525 | WIZ | intron_02 | chr19:15448367-15449466 | chr19:15448925-15448944 | GUUAAUGCUGGAGAACCCUA | - |
| 196 | 58525 | WIZ | intron_02 | chr19:15448367-15449466 | chr19:15448907-15448926 | UUCCCCCACACAGGACCUUA | + |
| 197 | 58525 | WIZ | intron_02 | chr19:15448367-15449466 | chr19:15448906-15448925 | CUUCCCCCACACAGGACCUU | + |
| 198 | 58525 | WIZ | intron_02 | chr19:15448367-15449466 | chr19:15448915-15448934 | GAGAACCCUAAGGUCCUGUG | - |
| 199 | 58525 | WIZ | intron_02 | chr19:15448367-15449466 | chr19:15448908-15448927 | CUAAGGUCCUGUGUGGGGGA | - |
| 200 | 58525 | WIZ | intron_02 | chr19:15448367-15449466 | chr19:15448907-15448926 | UAAGGUCCUGUGUGGGGGAA | - |
| 201 | 58525 | WIZ | intron_02 | chr19:15448367-15449466 | chr19:15448875-15448894 | GGGAAAAGUGCAGGGAUCAU | - |
| 202 | 58525 | WIZ | intron_02 | chr19:15448367-15449466 | chr19:15448857-15448876 | AUUGGUAUGGGACAACCCAA | - |
| 203 | 58525 | WIZ | intron_02 | chr19:15448367-15449466 | chr19:15448839-15448858 | CCCCUUUACUUUUCUCCAUU | + |
| 204 | 58525 | WIZ | intron_02 | chr19:15448367-15449466 | chr19:15448819-15448838 | UAAUGAUGGGAGACUCCUGA | - |
| 205 | 58525 | WIZ | intron_02 | chr19:15448367-15449466 | chr19:15448811-15448830 | GGAGACUCCUGACGGUGUAU | - |
| 206 | 58525 | WIZ | intron_02 | chr19:15448367-15449466 | chr19:15448793-15448812 | AUAGGAUCAGAGUGUACAAG | - |
| 207 | 58525 | WIZ | intron_02 | chr19:15448367-15449466 | chr19:15448789-15448808 | GAUCAGAGUGUACAAGUGGC | - |
| 208 | 58525 | WIZ | intron_02 | chr19:15448367-15449466 | chr19:15448788-15448807 | AUCAGAGUGUACAAGUGGCU | - |
| 209 | 58525 | WIZ | intron_02 | chr19:15448367-15449466 | chr19:15448775-15448794 | AGUGGCUGGGAUUCUUGCCG | - |
| 210 | 58525 | WIZ | intron_02 | chr19:15448367-15449466 | chr19:15448766-15448785 | GAUUCUUGCCGAGGAAACGA | - |
| 211 | 58525 | WIZ | intron_02 | chr19:15448367-15449466 | chr19:15448761-15448780 | UUGCCGAGGAAACGAAGGCA | - |
| 212 | 58525 | WIZ | intron_02 | chr19:15448367-15449466 | chr19:15448754-15448773 | GGAAACGAAGGCAUGGCAGU | - |
| 213 | 58525 | WIZ | intron_02 | chr19:15448367-15449466 | chr19:15448738-15448757 | CAGUAGGAUGUGCGUGUGCA | - |
| 214 | 58525 | WIZ | intron_02 | chr19:15448367-15449466 | chr19:15448718-15448737 | UGGAUGUGAGGGCAGGACUG | - |
| 215 | 58525 | WIZ | intron_02 | chr19:15448367-15449466 | chr19:15448681-15448700 | UGUGAAUGAAGGGAGGCGUC | - |
| 216 | 58525 | WIZ | intron_02 | chr19:15448367-15449466 | chr19:15448646-15448665 | AUUGAUGGAAGAAGACCAGG | - |
| 217 | 58525 | WIZ | intron_02 | chr19:15448367-15449466 | chr19:15448589-15448608 | GCAGUGCAGGAUCUGUAUAA | - |
| 218 | 58525 | WIZ | intron_02 | chr19:15448367-15449466 | chr19:15448588-15448607 | CAGUGCAGGAUCUGUAUAAA | - |
| 219 | 58525 | WIZ | intron_02 | chr19:15448367-15449466 | chr19:15448561-15448580 | AGUUAUUGAUGGGGAGACGG | - |
| 220 | 58525 | WIZ | intron_02 | chr19:15448367-15449466 | chr19:15448545-15448564 | ACGGAGGCAUGCUGAGGGUA | - |
| 221 | 58525 | WIZ | intron_02 | chr19:15448367-15449466 | chr19:15448537-15448556 | AUGCUGAGGGUAGGGGCCAU | - |
| 222 | 58525 | WIZ | intron_02 | chr19:15448367-15449466 | chr19:15448536-15448555 | UGCUGAGGGUAGGGGCCAUU | - |
| 223 | 58525 | WIZ | intron_02 | chr19:15448367-15449466 | chr19:15448528-15448547 | GUAGGGGCCAUUGGGAUAGA | - |
| 224 | 58525 | WIZ | intron_02 | chr19:15448367-15449466 | chr19:15448521-15448540 | CCAUUGGGAUAGAAGGUGUG | - |
| 225 | 58525 | WIZ | intron_02 | chr19:15448367-15449466 | chr19:15448471-15448490 | UCAGUUUACCUCCCAGCCCA | + |
| 226 | 58525 | WIZ | intron_02 | chr19:15448367-15449466 | chr19:15448451-15448470 | GGCAGUGAGCUGCAAAGUUG | - |
| 227 | 58525 | WIZ | intron_02 | chr19:15448367 -15449466 | chr19:15448383-15448402 | AGGAAGUGCUUAGGGGAUGG | + |
| 228 | 58525 | WIZ | exon_03_nc | chr19:15448307 -15448367 | chr19:15448350-15448369 | CAGCGGGGCAUUGUGGGCCU | + |
| 229 | 58525 | WIZ | exon_03_nc | chr19:15448307 -15448367 | chr19:15448349-15448368 | UCAGCGGGGCAUUGUGGGCC | + |
| 230 | 58525 | WIZ | exon_03_nc | chr19:15448307 -15448367 | chr19:15448344-15448363 | CCGGCUCAGCGGGGCAUUGU | + |
| 231 | 58525 | WIZ | exon_03_nc | chr19:15448307 -15448367 | chr19:15448334-15448353 | AGCUGCUGCACCGGCUCAGC | + |
| 232 | 58525 | WIZ | exon_03_nc | chr19:15448307 -15448367 | chr19:15448325-15448344 | GAUCCACUCAGCUGCUGCAC | + |
| 233 | 58525 | WIZ | exon_03_nc | chr19:15448307 -15448367 | chr19:15448303-15448322 | UCCAUCGGAUUUUCUCUGCU | + |
| 234 | 58525 | WIZ | exon_03_nc | chr19:15448307 -15448367 | chr19:15448307-15448326 | UCCAAGCAGAGAAAAUCCGA | - |
| 235 | 58525 | WIZ | exon_03_c | chr19:15448102 -15448307 | chr19:15448303-15448322 | AGCAGAGAAAAUCCGAUGGA | - |
| 236 | 58525 | WIZ | exon_03_c | chr19:15448102 -15448307 | chr19:15448295-15448314 | AAAUCCGAUGGAGGGGUCUC | - |
| 237 | 58525 | WIZ | exon_03_c | chr19:15448102 -15448307 | chr19:15448262-15448281 | GGGGACGAUCUGGUGCAGCC | + |
| 238 | 58525 | WIZ | exon_03_c | chr19:15448102 -15448307 | chr19:15448252-15448271 | UCUGGGCCUUGGGGACGAUC | + |
| 239 | 58525 | WIZ | exon_03_c | chr19:15448102 -15448307 | chr19:15448261-15448280 | GCUGCACCAGAUCGUCCCCA | - |
| 240 | 58525 | WIZ | exon_03_c | chr19:15448102 -15448307 | chr19:15448234-15448253 | GCCGGGCCAGGCAGUCUCUC | + |
| 241 | 58525 | WIZ | exon_03_c | chr19:15448102 -15448307 | chr19:15448222-15448241 | UUCUCCCUUGGCGCCGGGCC | + |
| 242 | 58525 | WIZ | exon_03_c | chr19:15448102 -15448307 | chr19:15448217-15448236 | CGAUGUUCUCCCUUGGCGCC | + |
| 243 | 58525 | WIZ | exon_03_c | chr19:15448102 -15448307 | chr19:15448216-15448235 | UCGAUGUUCUCCCUUGGCGC | + |
| 244 | 58525 | WIZ | exon_03_c | chr19:15448102 -15448307 | chr19:15448210-15448229 | CCACCCUCGAUGUUCUCCCU | + |
| 245 | 58525 | WIZ | exon_03_c | chr19:15448102 -15448307 | chr19:15448217-15448236 | GGCGCCAAGGGAGAACAUCG | - |
| 246 | 58525 | WIZ | exon_03_c | chr19:15448102 -15448307 | chr19:15448216-15448235 | GCGCCAAGGGAGAACAUCGA | - |
| 247 | 58525 | WIZ | exon_03_c | chr19:15448102 -15448307 | chr19:15448212-15448231 | CAAGGGAGAACAUCGAGGGU | - |
| 248 | 58525 | WIZ | exon_03_c | chr19:15448102 -15448307 | chr19:15448146-15448165 | CUUGGUGACAGGCAGGUAAC | + |
| 249 | 58525 | WIZ | exon_03_c | chr19:15448102 -15448307 | chr19:15448145-15448164 | UUACCUGCCUGUCACCAAGG | - |
| 250 | 58525 | WIZ | exon_03_c | chr19:15448102 -15448307 | chr19:15448144-15448163 | UACCUGCCUGUCACCAAGGA | - |
| 251 | 58525 | WIZ | exon_03_c | chr19:15448102 -15448307 | chr19:15448128-15448147 | AAUGUCUCGGGGGCCCUCCU | + |
| 252 | 58525 | WIZ | exon_03_c | chr19:15448102 -15448307 | chr19:15448118-15448137 | UGCCAUCCAGAAUGUCUCGG | + |
| 253 | 58525 | WIZ | exon_03_c | chr19:15448102 -15448307 | chr19:15448117-15448136 | CUGCCAUCCAGAAUGUCUCG | + |
| 254 | 58525 | WIZ | exon_03_c | chr19:15448102 -15448307 | chr19:15448127-15448146 | GGAGGGCCCCCGAGACAUUC | - |
| 255 | 58525 | WIZ | exon_03_c | chr19:15448102 -15448307 | chr19:15448123-15448142 | GGCCCCCGAGACAUUCUGGA | - |
| 256 | 58525 | WIZ | exon_03_c | chr19:15448102 -15448307 | chr19:15448117-15448136 | CGAGACAUUCUGGAUGGCAG | - |
| 257 | 58525 | WIZ | intron_03 | chr19:15442748 -15448102 | chr19:15448093-15448112 | GGCAUCUCUGGUAAGAGAAU | - |
| 258 | 58525 | WIZ | intron_03 | chr19:15442748 -15448102 | chr19:15448085-15448104 | UGGUAAGAGAAUGGGCCGUG | - |
| 259 | 58525 | WIZ | intron_03 | chr19:15442748 -15448102 | chr19:15448077-15448096 | GAAUGGGCCGUGUGGCCCCC | - |
| 260 | 58525 | WIZ | intron_03 | chr19:15442748 -15448102 | chr19:15448076-15448095 | AAUGGGCCGUGUGGCCCCCA | - |
| 261 | 58525 | WIZ | intron_03 | chr19:15442748 -15448102 | chr19:15448057-15448076 | GAAUGGGCUGGAUGCUCCCU | + |
| 262 | 58525 | WIZ | intron_03 | chr19:15442748 -15448102 | chr19:15448056-15448075 | GGAAUGGGCUGGAUGCUCCC | + |
| 263 | 58525 | WIZ | intron_03 | chr19:15442748 -15448102 | chr19:15448009-15448028 | CAGCGCAGCAGCGGCUGAGC | - |
| 264 | 58525 | WIZ | intron_03 | chr19:15442748 -15448102 | chr19:15448008-15448027 | AGCGCAGCAGCGGCUGAGCU | - |
| 265 | 58525 | WIZ | intron_03 | chr19:15442748 -15448102 | chr19:15447991-15448010 | GCUGGGAUGCUGAUUCCGCU | - |
| 266 | 58525 | WIZ | intron_03 | chr19:15442748 -15448102 | chr19:15447990-15448009 | CUGGGAUGCUGAUUCCGCUU | - |
| 267 | 58525 | WIZ | intron_03 | chr19:15442748 -15448102 | chr19:15447883-15447902 | UACCACCCAGUGGGGAGCCU | + |
| 268 | 58525 | WIZ | intron_03 | chr19:15442748 -15448102 | chr19:15447875-15447894 | CAGCUCCAUACCACCCAGUG | + |
| 269 | 58525 | WIZ | intron_03 | chr19:15442748 -15448102 | chr19:15447825-15447844 | CCAAUUAGUAUGCUCAGAGG | + |
| 270 | 58525 | WIZ | intron_03 | chr19:15442748 -15448102 | chr19:15447822-15447841 | GACCCAAUUAGUAUGCUCAG | + |
| 271 | 58525 | WIZ | intron_03 | chr19:15442748 -15448102 | chr19:15447800-15447819 | GGGGUGCUGAGAUGGGCCUC | + |
| 272 | 58525 | WIZ | intron_03 | chr19:15442748 -15448102 | chr19:15447771-15447790 | GGAAUAAGUGGGCUGGGGGC | + |
| 273 | 58525 | WIZ | intron_03 | chr19:15442748 -15448102 | chr19:15447767-15447786 | CUGUGGAAUAAGUGGGCUGG | + |
| 274 | 58525 | WIZ | intron_03 | chr19:15442748 -15448102 | chr19:15447766-15447785 | CCUGUGGAAUAAGUGGGCUG | + |
| 275 | 58525 | WIZ | intron_03 | chr19:15442748 -15448102 | chr19:15447765-15447784 | ACCUGUGGAAUAAGUGGGCU | + |
| 276 | 58525 | WIZ | intron_03 | chr19:15442748 -15448102 | chr19:15447764-15447783 | UACCUGUGGAAUAAGUGGGC | + |
| 277 | 58525 | WIZ | intron_03 | chr19:15442748 -15448102 | chr19:15447760-15447779 | GGAAUACCUGUGGAAUAAGU | + |
| 278 | 58525 | WIZ | intron_03 | chr19:15442748 -15448102 | chr19:15447769-15447788 | CCCCAGCCCACUUAUUCCAC | - |
| 279 | 58525 | WIZ | intron_03 | chr19:15442748 -15448102 | chr19:15447719-15447738 | CCAGACAGCCAGAGGGAGCU | + |
| 280 | 58525 | WIZ | intron_03 | chr19:15442748 -15448102 | chr19:15447684-15447703 | GCUGUUUUGGCCCGUGGUUC | + |
| 281 | 58525 | WIZ | intron_03 | chr19:15442748 -15448102 | chr19:15447697-15447716 | GUAUCCUGUUCCUGAACCAC | - |
| 282 | 58525 | WIZ | intron_03 | chr19:15442748 -15448102 | chr19:15447665-15447684 | CUUCUGUAGUGGCUAGGGAG | - |
| 283 | 58525 | WIZ | intron_03 | chr19:15442748 -15448102 | chr19:15447644-15447663 | GGCUGGGUAGUCAGCGAUGC | - |
| 284 | 58525 | WIZ | intron_03 | chr19:15442748 -15448102 | chr19:15447614-15447633 | CUUUUUGCUGGGUAAACCAA | + |
| 285 | 58525 | WIZ | intron_03 | chr19:15442748 -15448102 | chr19:15447613-15447632 | CCUUUUUGCUGGGUAAACCA | + |
| 286 | 58525 | WIZ | intron_03 | chr19:15442748 -15448102 | chr19:15447602-15447621 | AGUGUGAGAUACCUUUUUGC | + |
| 287 | 58525 | WIZ | intron_03 | chr19:15442748 -15448102 | chr19:15447577-15447596 | GAAUAACACGUCUGGAGGUG | + |
| 288 | 58525 | WIZ | intron_03 | chr19:15442748 -15448102 | chr19:15447576-15447595 | UGAAUAACACGUCUGGAGGU | + |
| 289 | 58525 | WIZ | intron_03 | chr19:15442748 -15448102 | chr19:15447575-15447594 | AUGAAUAACACGUCUGGAGG | + |
| 290 | 58525 | WIZ | intron_03 | chr19:15442748 -15448102 | chr19:15447535-15447554 | CACAUACCCUGGCACACCGA | + |
| 291 | 58525 | WIZ | intron_03 | chr19:15442748 -15448102 | chr19:15447326-15447345 | CAUUCAAAUGCCACUCUAUC | + |
| 292 | 58525 | WIZ | intron_03 | chr19:15442748 -15448102 | chr19:15447226-15447245 | ACCAGGUCCUUGGACACGUC | + |
| 293 | 58525 | WIZ | intron_03 | chr19:15442748 -15448102 | chr19:15447209-15447228 | AGGCAUACCAGCCUCCUACC | + |
| 294 | 58525 | WIZ | intron_03 | chr19:15442748 -15448102 | chr19:15447122-15447141 | UUGCAAAAGCCUUGGCACGG | + |
| 295 | 58525 | WIZ | intron_03 | chr19:15442748 -15448102 | chr19:15447114-15447133 | AGAUGAUCUUGCAAAAGCCU | + |
| 296 | 58525 | WIZ | intron_03 | chr19:15442748 -15448102 | chr19:15447072-15447091 | AUAAUGAAGGCUAUUCCACA | + |
| 297 | 58525 | WIZ | intron_03 | chr19:15442748 -15448102 | chr19:15447071-15447090 | AAUAAUGAAGGCUAUUCCAC | + |
| 298 | 58525 | WIZ | intron_03 | chr19:15442748 -15448102 | chr19:15446918-15446937 | AAGGUGGCCAGAGCAGGUCA | + |
| 299 | 58525 | WIZ | intron_03 | chr19:15442748 -15448102 | chr19:15446928-15446947 | CACAGAUCCUUGACCUGCUC | - |
| 300 | 58525 | WIZ | intron_03 | chr19:15442748 -15448102 | chr19:15446902-15446921 | AGCAUCAUGAGUUGUAAAGG | + |
| 301 | 58525 | WIZ | intron_03 | chr19:15442748 -15448102 | chr19:15446899-15446918 | CCGAGCAUCAUGAGUUGUAA | + |
| 302 | 58525 | WIZ | intron_03 | chr19:15442748 -15448102 | chr19:15446845-15446864 | CACCGCUGUGCCCCAGGGCG | + |
| 303 | 58525 | WIZ | intron_03 | chr19:15442748 -15448102 | chr19:15446840-15446859 | UCAGUCACCGCUGUGCCCCA | + |
| 304 | 58525 | WIZ | intron_03 | chr19:15442748 -15448102 | chr19:15446806-15446825 | UGGUGGGGUCUAUGAGAGCG | + |
| 305 | 58525 | WIZ | intron_03 | chr19:15442748 -15448102 | chr19:15446790-15446809 | UCUCCCCAGCCUCAGAUGGU | + |
| 306 | 58525 | WIZ | intron_03 | chr19:15442748 -15448102 | chr19:15446789-15446808 | GUCUCCCCAGCCUCAGAUGG | + |
| 307 | 58525 | WIZ | intron_03 | chr19:15442748 -15448102 | chr19:15446753-15446772 | CAUAACACCGGGUCAUAACA | + |
| 308 | 58525 | WIZ | intron_03 | chr19:15442748 -15448102 | chr19:15446742-15446761 | ACACCUGGUGACAUAACACC | + |
| 309 | 58525 | WIZ | intron_03 | chr19:15442748 -15448102 | chr19:15446741-15446760 | AACACCUGGUGACAUAACAC | + |
| 310 | 58525 | WIZ | intron_03 | chr19:15442748 -15448102 | chr19:15446727-15446746 | AGCCGCUGUGUCAUAACACC | + |
| 311 | 58525 | WIZ | intron_03 | chr19:15442748 -15448102 | chr19:15446617-15446636 | CUAGAUGCUUGCUUCCCCCU | + |
| 312 | 58525 | WIZ | intron_03 | chr19:15442748 -15448102 | chr19:15446553-15446572 | AUCUGCAGGUGUCAGGCAGU | - |
| 313 | 58525 | WIZ | intron_03 | chr19:15442748 -15448102 | chr19:15446529-15446548 | UGGCAAGGUGAGACCCCUGA | - |
| 314 | 58525 | WIZ | intron_03 | chr19:15442748 -15448102 | chr19:15446491-15446510 | GAGUGCUGAUACUCUGGAGU | + |
| 315 | 58525 | WIZ | intron_03 | chr19:15442748 -15448102 | chr19:15446485-15446504 | UUCCCUGAGUGCUGAUACUC | + |
| 316 | 58525 | WIZ | intron_03 | chr19:15442748 -15448102 | chr19:15446450-15446469 | GUUAUUAAUGGCUUAGAGGA | + |
| 317 | 58525 | WIZ | intron_03 | chr19:15442748 -15448102 | chr19:15446446-15446465 | CUCAGUUAUUAAUGGCUUAG | + |
| 318 | 58525 | WIZ | intron_03 | chr19:15442748 -15448102 | chr19:15446340-15446359 | AGCCUGAGGGUACAGGCUCU | - |
| 319 | 58525 | WIZ | intron_03 | chr19:15442748 -15448102 | chr19:15446331-15446350 | GUACAGGCUCUAGGGAUCCC | - |
| 320 | 58525 | WIZ | intron_03 | chr19:15442748 -15448102 | chr19:15446330-15446349 | UACAGGCUCUAGGGAUCCCA | - |
| 321 | 58525 | WIZ | intron_03 | chr19:15442748 -15448102 | chr19:15446303-15446322 | CCUCGGAACCAGACCCAGAG | + |
| 322 | 58525 | WIZ | intron_03 | chr19:15442748 -15448102 | chr19:15446300-15446319 | UGGGUCUGGUUCCGAGGGAU | - |
| 323 | 58525 | WIZ | intron_03 | chr19:15442748 -15448102 | chr19:15446268-15446287 | CUCUACCUCGCAGAUGCCCC | - |
| 324 | 58525 | WIZ | intron_03 | chr19:15442748 -15448102 | chr19:15446261-15446280 | UCGCAGAUGCCCCAGGUCUG | - |
| 325 | 58525 | WIZ | intron_03 | chr19:15442748 -15448102 | chr19:15446206-15446225 | GUGAUUCCCCAGUGGGAGUG | + |
| 326 | 58525 | WIZ | intron_03 | chr19:15442748 -15448102 | chr19:15446199-15446218 | ACCCUGGGUGAUUCCCCAGU | + |
| 327 | 58525 | WIZ | intron_03 | chr19:15442748 -15448102 | chr19:15446183-15446202 | CAGAUGCACGUAUGAGACCC | + |
| 328 | 58525 | WIZ | intron_03 | chr19:15442748 -15448102 | chr19:15446173-15446192 | CGUGCAUCUGUUUUAUAGCU | - |
| 329 | 58525 | WIZ | intron_03 | chr19:15442748 -15448102 | chr19:15446172-15446191 | GUGCAUCUGUUUUAUAGCUU | - |
| 330 | 58525 | WIZ | intron_03 | chr19:15442748 -15448102 | chr19:15446112-15446131 | UGAGGGAAACCUUCAAGGGU | + |
| 331 | 58525 | WIZ | intron_03 | chr19:15442748 -15448102 | chr19:15446124-15446143 | GGGGCCAGGCCCACCCUUGA | - |
| 332 | 58525 | WIZ | intron_03 | chr19:15442748 -15448102 | chr19:15446107-15446126 | UGAAGGUUUCCCUCAGCAGC | - |
| 333 | 58525 | WIZ | intron_03 | chr19:15442748 -15448102 | chr19:15446105-15446124 | AAGGUUUCCCUCAGCAGCUG | - |
| 334 | 58525 | WIZ | intron_03 | chr19:15442748 -15448102 | chr19:15446079-15446098 | GGGAUAGGAAUGGCUUGACU | - |
| 335 | 58525 | WIZ | intron_03 | chr19:15442748 -15448102 | chr19:15446054-15446073 | UGAGGUCAUGGCCUGAAUGU | - |
| 336 | 58525 | WIZ | intron_03 | chr19:15442748 -15448102 | chr19:15446021-15446040 | AGACGUGGUGUCCCAAACCC | + |
| 337 | 58525 | WIZ | intron_03 | chr19:15442748 -15448102 | chr19:15445989-15446008 | GGAGAUCAAGCGGGCAGAGA | + |
| 338 | 58525 | WIZ | intron_03 | chr19:15442748 -15448102 | chr19:15445980-15445999 | CCCGGAGGGGGAGAUCAAGC | + |
| 339 | 58525 | WIZ | intron_03 | chr19:15442748 -15448102 | chr19:15445979-15445998 | UCCCGGAGGGGGAGAUCAAG | + |
| 340 | 58525 | WIZ | intron_03 | chr19:15442748 -15448102 | chr19:15445984-15446003 | GCCCGCUUGAUCUCCCCCUC | - |
| 341 | 58525 | WIZ | intron_03 | chr19:15442748 -15448102 | chr19:15445968-15445987 | AGGUGCCCGUGUCCCGGAGG | + |
| 342 | 58525 | WIZ | intron_03 | chr19:15442748 -15448102 | chr19:15445967-15445986 | CAGGUGCCCGUGUCCCGGAG | + |
| 343 | 58525 | WIZ | intron_03 | chr19:15442748 -15448102 | chr19:15445966-15445985 | GCAGGUGCCCGUGUCCCGGA | + |
| 344 | 58525 | WIZ | intron_03 | chr19:15442748 -15448102 | chr19:15445965-15445984 | GGCAGGUGCCCGUGUCCCGG | + |
| 345 | 58525 | WIZ | intron_03 | chr19:15442748 -15448102 | chr19:15445977-15445996 | UGAUCUCCCCCUCCGGGACA | - |
| 346 | 58525 | WIZ | intron_03 | chr19:15442748 -15448102 | chr19:15445976-15445995 | GAUCUCCCCCUCCGGGACAC | - |
| 347 | 58525 | WIZ | intron_03 | chr19:15442748 -15448102 | chr19:15445948-15445967 | CAUCACAAGACUAGUAGGGC | + |
| 348 | 58525 | WIZ | intron_03 | chr19:15442748 -15448102 | chr19:15445944-15445963 | UAGGCAUCACAAGACUAGUA | + |
| 349 | 58525 | WIZ | intron_03 | chr19:15442748 -15448102 | chr19:15445943-15445962 | AUAGGCAUCACAAGACUAGU | + |
| 350 | 58525 | WIZ | intron_03 | chr19:15442748 -15448102 | chr19:15445925-15445944 | CAGAGCCUGUUCCUAUUUAU | + |
| 351 | 58525 | WIZ | intron_03 | chr19:15442748 -15448102 | chr19:15445933-15445952 | UGAUGCCUAUAAAUAGGAAC | - |
| 352 | 58525 | WIZ | intron_03 | chr19:15442748 -15448102 | chr19:15445927-15445946 | CUAUAAAUAGGAACAGGCUC | - |
| 353 | 58525 | WIZ | intron_03 | chr19:15442748 -15448102 | chr19:15445926-15445945 | UAUAAAUAGGAACAGGCUCU | - |
| 354 | 58525 | WIZ | intron_03 | chr19:15442748 -15448102 | chr19:15445901-15445920 | UGCUAUUCCACCCCAAAGCC | - |
| 355 | 58525 | WIZ | intron_03 | chr19:15442748 -15448102 | chr19:15445870-15445889 | UGAGGGCUGAGUGGGGAUAA | + |
| 356 | 58525 | WIZ | intron_03 | chr19:15442748 -15448102 | chr19:15445844-15445863 | CACUCCAGUGUGCUCUUGGG | + |
| 357 | 58525 | WIZ | intron_03 | chr19:15442748 -15448102 | chr19:15445843-15445862 | CCACUCCAGUGUGCUCUUGG | + |
| 358 | 58525 | WIZ | intron_03 | chr19:15442748 -15448102 | chr19:15445842-15445861 | GCCACUCCAGUGUGCUCUUG | + |
| 359 | 58525 | WIZ | intron_03 | chr19:15442748 -15448102 | chr19:15445814-15445833 | CCUGCCCAGGCAGGGAAGUU | + |
| 360 | 58525 | WIZ | intron_03 | chr19:15442748 -15448102 | chr19:15445821-15445840 | ACCUCCAAACUUCCCUGCCU | - |
| 361 | 58525 | WIZ | intron_03 | chr19:15442748 -15448102 | chr19:15445806-15445825 | GGCACACCCCUGCCCAGGCA | + |
| 362 | 58525 | WIZ | intron_03 | chr19:15442748 -15448102 | chr19:15445817-15445836 | CCAAACUUCCCUGCCUGGGC | - |
| 363 | 58525 | WIZ | intron_03 | chr19:15442748 -15448102 | chr19:15445816-15445835 | CAAACUUCCCUGCCUGGGCA | - |
| 364 | 58525 | WIZ | intron_03 | chr19:15442748 -15448102 | chr19:15445778-15445797 | GCCGUAACGGGGGACAGAGG | + |
| 365 | 58525 | WIZ | intron_03 | chr19:15442748 -15448102 | chr19:15445775-15445794 | ACAGCCGUAACGGGGGACAG | + |
| 366 | 58525 | WIZ | intron_03 | chr19:15442748 -15448102 | chr19:15445782-15445801 | GCCUCCUCUGUCCCCCGUUA | - |
| 367 | 58525 | WIZ | intron_03 | chr19:15442748 -15448102 | chr19:15445768-15445787 | UGGGUAAACAGCCGUAACGG | + |
| 368 | 58525 | WIZ | intron_03 | chr19:15442748 -15448102 | chr19:15445767-15445786 | CUGGGUAAACAGCCGUAACG | + |
| 369 | 58525 | WIZ | intron_03 | chr19:15442748 -15448102 | chr19:15445765-15445784 | CUCUGGGUAAACAGCCGUAA | + |
| 370 | 58525 | WIZ | intron_03 | chr19:15442748 -15448102 | chr19:15445701-15445720 | CCAGGUUCAGAAAAGACUCA | - |
| 371 | 58525 | WIZ | intron_03 | chr19:15442748 -15448102 | chr19:15445700-15445719 | CAGGUUCAGAAAAGACUCAG | - |
| 372 | 58525 | WIZ | intron_03 | chr19:15442748 -15448102 | chr19:15445665-15445684 | GUAUGGAUCGAUGAAGAGUC | - |
| 373 | 58525 | WIZ | intron_03 | chr19:15442748 -15448102 | chr19:15445606-15445625 | AAUGAUAUGUCAUUUGUCCC | + |
| 374 | 58525 | WIZ | intron_03 | chr19:15442748 -15448102 | chr19:15445583-15445602 | GCUGUCUUGAGGCCCCAGCC | - |
| 375 | 58525 | WIZ | intron_03 | chr19:15442748 -15448102 | chr19:15445567-15445586 | UCUGAUUUUCUCCCCAGGCU | + |
| 376 | 58525 | WIZ | intron_03 | chr19:15442748 -15448102 | chr19:15445562-15445581 | CAUGCUCUGAUUUUCUCCCC | + |
| 377 | 58525 | WIZ | intron_03 | chr19:15442748 -15448102 | chr19:15445547-15445566 | GCAUGGAGUGACCGGACCUG | - |
| 378 | 58525 | WIZ | intron_03 | chr19:15442748 -15448102 | chr19:15445541-15445560 | AGUGACCGGACCUGAGGCUC | - |
| 379 | 58525 | WIZ | intron_03 | chr19:15442748 -15448102 | chr19:15445540-15445559 | GUGACCGGACCUGAGGCUCU | - |
| 380 | 58525 | WIZ | intron_03 | chr19:15442748 -15448102 | chr19:15445498-15445517 | GGUUCAGCGAUGUCUCAAGG | + |
| 381 | 58525 | WIZ | intron_03 | chr19:15442748 -15448102 | chr19:15445497-15445516 | UGGUUCAGCGAUGUCUCAAG | + |
| 382 | 58525 | WIZ | intron_03 | chr19:15442748 -15448102 | chr19:15445496-15445515 | CUGGUUCAGCGAUGUCUCAA | + |
| 383 | 58525 | WIZ | intron_03 | chr19:15442748 -15448102 | chr19:15445495-15445514 | GCUGGUUCAGCGAUGUCUCA | + |
| 384 | 58525 | WIZ | intron_03 | chr19:15442748 -15448102 | chr19:15445439-15445458 | UCCAGAGAAGUGGCGGUGGA | + |
| 385 | 58525 | WIZ | intron_03 | chr19:15442748 -15448102 | chr19:15445388-15445407 | AGUCUCGCAGGGCCAGCAAU | + |
| 386 | 58525 | WIZ | intron_03 | chr19:15442748 -15448102 | chr19:15445377-15445396 | GCCACCGACCCAGUCUCGCA | + |
| 387 | 58525 | WIZ | intron_03 | chr19:15442748 -15448102 | chr19:15445376-15445395 | AGCCACCGACCCAGUCUCGC | + |
| 388 | 58525 | WIZ | intron_03 | chr19:15442748 -15448102 | chr19:15445291-15445310 | AUCCGAGUUCAAUACCCCAG | + |
| 389 | 58525 | WIZ | intron_03 | chr19:15442748 -15448102 | chr19:15445290-15445309 | GAUCCGAGUUCAAUACCCCA | + |
| 390 | 58525 | WIZ | intron_03 | chr19:15442748 -15448102 | chr19:15445289-15445308 | AGAUCCGAGUUCAAUACCCC | + |
| 391 | 58525 | WIZ | intron_03 | chr19:15442748 -15448102 | chr19:15445239-15445258 | UGGGGUUCAACUUGGUAGAG | + |
| 392 | 58525 | WIZ | intron_03 | chr19:15442748 -15448102 | chr19:15445221-15445240 | CAGCCUGAACUCCAAGCCUG | + |
| 393 | 58525 | WIZ | intron_03 | chr19:15442748 -15448102 | chr19:15445179-15445198 | AGCAUUUGCAAACUCUCUCG | - |
| 394 | 58525 | WIZ | intron_03 | chr19:15442748 -15448102 | chr19:15445168-15445187 | ACUCUCUCGGGGAACCCAGA | - |
| 395 | 58525 | WIZ | intron_03 | chr19:15442748 -15448102 | chr19:15445151-15445170 | CUUGUUGGCUCCUGCCAUCU | + |
| 396 | 58525 | WIZ | intron_03 | chr19:15442748 -15448102 | chr19:15445150-15445169 | CCUUGUUGGCUCCUGCCAUC | + |
| 397 | 58525 | WIZ | intron_03 | chr19:15442748 -15448102 | chr19:15445164-15445183 | UCUCGGGGAACCCAGAUGGC | - |
| 398 | 58525 | WIZ | intron_03 | chr19:15442748 -15448102 | chr19:15445136-15445155 | CCAUGCCAAGGGGCCCUUGU | + |
| 399 | 58525 | WIZ | intron_03 | chr19:15442748 -15448102 | chr19:15445139-15445158 | CCAACAAGGGCCCCUUGGCA | - |
| 400 | 58525 | WIZ | intron_03 | chr19:15442748 -15448102 | chr19:15445125-15445144 | UUAGGCAGUGGCCAUGCCAA | + |
| 401 | 58525 | WIZ | intron_03 | chr19:15442748 -15448102 | chr19:15445107-15445126 | GGCGCUAGGUCGCAGCCCUU | + |
| 402 | 58525 | WIZ | intron_03 | chr19:15442748 -15448102 | chr19:15445093-15445112 | UACGGGUCAGAUGAGGCGCU | + |
| 403 | 58525 | WIZ | intron_03 | chr19:15442748 -15448102 | chr19:15445086-15445105 | GAGUCCCUACGGGUCAGAUG | + |
| 404 | 58525 | WIZ | intron_03 | chr19:15442748 -15448102 | chr19:15445094-15445113 | UAGCGCCUCAUCUGACCCGU | - |
| 405 | 58525 | WIZ | intron_03 | chr19:15442748 -15448102 | chr19:15445093-15445112 | AGCGCCUCAUCUGACCCGUA | - |
| 406 | 58525 | WIZ | intron_03 | chr19:15442748 -15448102 | chr19:15445085-15445104 | AUCUGACCCGUAGGGACUCC | - |
| 407 | 58525 | WIZ | intron_03 | chr19:15442748 -15448102 | chr19:15445055-15445074 | CCAGAGGCCUCCACAGUUGA | + |
| 408 | 58525 | WIZ | intron_03 | chr19:15442748 -15448102 | chr19:15445068-15445087 | UCCUGGAUCCCCAUCAACUG | - |
| 409 | 58525 | WIZ | intron_03 | chr19:15442748 -15448102 | chr19:15445065-15445084 | UGGAUCCCCAUCAACUGUGG | - |
| 410 | 58525 | WIZ | intron_03 | chr19:15442748 -15448102 | chr19:15445023-15445042 | UGUCCAAGACACCUUGGGGG | + |
| 411 | 58525 | WIZ | intron_03 | chr19:15442748 -15448102 | chr19:15445020-15445039 | CUGUGUCCAAGACACCUUGG | + |
| 412 | 58525 | WIZ | intron_03 | chr19:15442748 -15448102 | chr19:15445019-15445038 | CCUGUGUCCAAGACACCUUG | + |
| 413 | 58525 | WIZ | intron_03 | chr19:15442748 -15448102 | chr19:15445018-15445037 | CCCUGUGUCCAAGACACCUU | + |
| 414 | 58525 | WIZ | intron_03 | chr19:15442748 -15448102 | chr19:15445022-15445041 | CCCCAAGGUGUCUUGGACAC | - |
| 415 | 58525 | WIZ | intron_03 | chr19:15442748 -15448102 | chr19:15445021-15445040 | CCCAAGGUGUCUUGGACACA | - |
| 416 | 58525 | WIZ | intron_03 | chr19:15442748 -15448102 | chr19:15445011-15445030 | CUUGGACACAGGGCACUGCU | - |
| 417 | 58525 | WIZ | intron_03 | chr19:15442748 -15448102 | chr19:15444963-15444982 | AGCGAGGCUCCUAUUUUUAG | + |
| 418 | 58525 | WIZ | intron_03 | chr19:15442748 -15448102 | chr19:15444975-15444994 | AAGUCACUGCCACUAAAAAU | - |
| 419 | 58525 | WIZ | intron_03 | chr19:15442748 -15448102 | chr19:15444964-15444983 | ACUAAAAAUAGGAGCCUCGC | - |
| 420 | 58525 | WIZ | intron_03 | chr19:15442748 -15448102 | chr19:15444947-15444966 | UUGUCUGAGCAAUUCCAGCG | + |
| 421 | 58525 | WIZ | intron_03 | chr19:15442748 -15448102 | chr19:15444945-15444964 | CUGGAAUUGCUCAGACAAAG | - |
| 422 | 58525 | WIZ | intron_03 | chr19:15442748 -15448102 | chr19:15444937-15444956 | GCUCAGACAAAGAGGCCACG | - |
| 423 | 58525 | WIZ | intron_03 | chr19:15442748 -15448102 | chr19:15444919-15444938 | CCAAGAGCCAGGGGACCGCG | + |
| 424 | 58525 | WIZ | intron_03 | chr19:15442748 -15448102 | chr19:15444929-15444948 | AAAGAGGCCACGCGGUCCCC | - |
| 425 | 58525 | WIZ | intron_03 | chr19:15442748 -15448102 | chr19:15444910-15444929 | CUAAGAAUUCCAAGAGCCAG | + |
| 426 | 58525 | WIZ | intron_03 | chr19:15442748 -15448102 | chr19:15444909-15444928 | UCUAAGAAUUCCAAGAGCCA | + |
| 427 | 58525 | WIZ | intron_03 | chr19:15442748 -15448102 | chr19:15444922-15444941 | CCACGCGGUCCCCUGGCUCU | - |
| 428 | 58525 | WIZ | intron_03 | chr19:15442748 -15448102 | chr19:15444882-15444901 | AAUCGCAGAAUCAUCAAAUC | - |
| 429 | 58525 | WIZ | intron_03 | chr19:15442748 -15448102 | chr19:15444881-15444900 | AUCGCAGAAUCAUCAAAUCU | - |
| 430 | 58525 | WIZ | intron_03 | chr19:15442748 -15448102 | chr19:15444873-15444892 | AUCAUCAAAUCUGGGACGCC | - |
| 431 | 58525 | WIZ | intron_03 | chr19:15442748 -15448102 | chr19:15444851-15444870 | ACCCCAAGCUCCCAAGAUUC | + |
| 432 | 58525 | WIZ | intron_03 | chr19:15442748 -15448102 | chr19:15444865-15444884 | AUCUGGGACGCCCGGAAUCU | - |
| 433 | 58525 | WIZ | intron_03 | chr19:15442748 -15448102 | chr19:15444864-15444883 | UCUGGGACGCCCGGAAUCUU | - |
| 434 | 58525 | WIZ | intron_03 | chr19:15442748 -15448102 | chr19:15444856-15444875 | GCCCGGAAUCUUGGGAGCUU | - |
| 435 | 58525 | WIZ | intron_03 | chr19:15442748 -15448102 | chr19:15444855-15444874 | CCCGGAAUCUUGGGAGCUUG | - |
| 436 | 58525 | WIZ | intron_03 | chr19:15442748 -15448102 | chr19:15444828-15444847 | CAUCCUGCUUUUGAGGUUCU | + |
| 437 | 58525 | WIZ | intron_03 | chr19:15442748 -15448102 | chr19:15444825-15444844 | ACCUCAAAAGCAGGAUGCCC | - |
| 438 | 58525 | WIZ | intron_03 | chr19:15442748 -15448102 | chr19:15444790-15444809 | CUAGCAUGACCUAGAGGUGU | + |
| 439 | 58525 | WIZ | intron_03 | chr19:15442748 -15448102 | chr19:15444789-15444808 | CCUAGCAUGACCUAGAGGUG | + |
| 440 | 58525 | WIZ | intron_03 | chr19:15442748 -15448102 | chr19:15444784-15444803 | CCUGCCCUAGCAUGACCUAG | + |
| 441 | 58525 | WIZ | intron_03 | chr19:15442748 -15448102 | chr19:15444792-15444811 | CCACACCUCUAGGUCAUGCU | - |
| 442 | 58525 | WIZ | intron_03 | chr19:15442748 -15448102 | chr19:15444791-15444810 | CACACCUCUAGGUCAUGCUA | - |
| 443 | 58525 | WIZ | intron_03 | chr19:15442748 -15448102 | chr19:15444787-15444806 | CCUCUAGGUCAUGCUAGGGC | - |
| 444 | 58525 | WIZ | intron_03 | chr19:15442748 -15448102 | chr19:15444695-15444714 | CCUGGCCCAGCCAAGAAACA | + |
| 445 | 58525 | WIZ | intron_03 | chr19:15442748 -15448102 | chr19:15444663-15444682 | UGGAGAGGGCGUUCAGAGUU | + |
| 446 | 58525 | WIZ | intron_03 | chr19:15442748 -15448102 | chr19:15444635-15444654 | GCAAGGGCUGGUUUUAGGAU | + |
| 447 | 58525 | WIZ | intron_03 | chr19:15442748 -15448102 | chr19:15444634-15444653 | UGCAAGGGCUGGUUUUAGGA | + |
| 448 | 58525 | WIZ | intron_03 | chr19:15442748 -15448102 | chr19:15444630-15444649 | UGGGUGCAAGGGCUGGUUUU | + |
| 449 | 58525 | WIZ | intron_03 | chr19:15442748 -15448102 | chr19:15444619-15444638 | AGAGCUGUGCCUGGGUGCAA | + |
| 450 | 58525 | WIZ | intron_03 | chr19:15442748 -15448102 | chr19:15444631-15444650 | UAAAACCAGCCCUUGCACCC | - |
| 451 | 58525 | WIZ | intron_03 | chr19:15442748 -15448102 | chr19:15444547-15444566 | ACCAAAGUGUCCCCUGGAGG | + |
| 452 | 58525 | WIZ | intron_03 | chr19:15442748 -15448102 | chr19:15444545-15444564 | UUACCAAAGUGUCCCCUGGA | + |
| 453 | 58525 | WIZ | intron_03 | chr19:15442748 -15448102 | chr19:15444375-15444394 | UUUGCAUCAUCUACAGCGCA | + |
| 454 | 58525 | WIZ | intron_03 | chr19:15442748 -15448102 | chr19:15444338-15444357 | UGUGUGACCUCUGGAAGGGG | + |
| 455 | 58525 | WIZ | intron_03 | chr19:15442748 -15448102 | chr19:15444319-15444338 | AACAGUCACAACCCUUUUCU | - |
| 456 | 58525 | WIZ | intron_03 | chr19:15442748 -15448102 | chr19:15444318-15444337 | ACAGUCACAACCCUUUUCUU | - |
| 457 | 58525 | WIZ | intron_03 | chr19:15442748 -15448102 | chr19:15444272-15444291 | GACCAGAAAGGUGUGGUCAC | + |
| 458 | 58525 | WIZ | intron_03 | chr19:15442748 -15448102 | chr19:15444260-15444279 | GGAGAGGGUGUUGACCAGAA | + |
| 459 | 58525 | WIZ | intron_03 | chr19:15442748 -15448102 | chr19:15444197-15444216 | UCUCAAUUUCUCGGGCCAAU | - |
| 460 | 58525 | WIZ | intron_03 | chr19:15442748 -15448102 | chr19:15444179-15444198 | CCAAUCCCUCAUCAUCCAAU | + |
| 461 | 58525 | WIZ | intron_03 | chr19:15442748 -15448102 | chr19:15444188-15444207 | CUCGGGCCAAUUGGAUGAUG | - |
| 462 | 58525 | WIZ | intron_03 | chr19:15442748 -15448102 | chr19:15444187-15444206 | UCGGGCCAAUUGGAUGAUGA | - |
| 463 | 58525 | WIZ | intron_03 | chr19:15442748 -15448102 | chr19:15444146-15444165 | CCCAGCCCUAUCCCUUUUUC | - |
| 464 | 58525 | WIZ | intron_03 | chr19:15442748 -15448102 | chr19:15444119-15444138 | GAUUAGCCUCAAUUUGAGGA | + |
| 465 | 58525 | WIZ | intron_03 | chr19:15442748 -15448102 | chr19:15444115-15444134 | GUUGGAUUAGCCUCAAUUUG | + |
| 466 | 58525 | WIZ | intron_03 | chr19:15442748 -15448102 | chr19:15444097-15444116 | AGCCCGACAGAUGCAAUUGU | + |
| 467 | 58525 | WIZ | intron_03 | chr19:15442748 -15448102 | chr19:15444102-15444121 | AUCCAACAAUUGCAUCUGUC | - |
| 468 | 58525 | WIZ | intron_03 | chr19:15442748 -15448102 | chr19:15444096-15444115 | CAAUUGCAUCUGUCGGGCUC | - |
| 469 | 58525 | WIZ | intron_03 | chr19:15442748 -15448102 | chr19:15444092-15444111 | UGCAUCUGUCGGGCUCUGGA | - |
| 470 | 58525 | WIZ | intron_03 | chr19:15442748 -15448102 | chr19:15444090-15444109 | CAUCUGUCGGGCUCUGGACG | - |
| 471 | 58525 | WIZ | intron_03 | chr19:15442748 -15448102 | chr19:15444061-15444080 | UUCCCCCAGUGUGUUAACCU | - |
| 472 | 58525 | WIZ | intron_03 | chr19:15442748 -15448102 | chr19:15444041-15444060 | CAGGCCAAUUGCCCGGGCCA | + |
| 473 | 58525 | WIZ | intron_03 | chr19:15442748 -15448102 | chr19:15444055-15444074 | CAGUGUGUUAACCUUGGCCC | - |
| 474 | 58525 | WIZ | intron_03 | chr19:15442748 -15448102 | chr19:15444035-15444054 | GGGGAGCAGGCCAAUUGCCC | + |
| 475 | 58525 | WIZ | intron_03 | chr19:15442748 -15448102 | chr19:15444034-15444053 | CGGGGAGCAGGCCAAUUGCC | + |
| 476 | 58525 | WIZ | intron_03 | chr19:15442748 -15448102 | chr19:15444048-15444067 | UUAACCUUGGCCCGGGCAAU | - |
| 477 | 58525 | WIZ | intron_03 | chr19:15442748 -15448102 | chr19:15444022-15444041 | AAGCUUGCCAAUCGGGGAGC | + |
| 478 | 58525 | WIZ | intron_03 | chr19:15442748 -15448102 | chr19:15444032-15444051 | CAAUUGGCCUGCUCCCCGAU | - |
| 479 | 58525 | WIZ | intron_03 | chr19:15442748 -15448102 | chr19:15444016-15444035 | GUGGGUAAGCUUGCCAAUCG | + |
| 480 | 58525 | WIZ | intron_03 | chr19:15442748 -15448102 | chr19:15444015-15444034 | CGUGGGUAAGCUUGCCAAUC | + |
| 481 | 58525 | WIZ | intron_03 | chr19:15442748 -15448102 | chr19:15444014-15444033 | ACGUGGGUAAGCUUGCCAAU | + |
| 482 | 58525 | WIZ | intron_03 | chr19:15442748 -15448102 | chr19:15444013-15444032 | UUGGCAAGCUUACCCACGUC | - |
| 483 | 58525 | WIZ | intron_03 | chr19:15442748 -15448102 | chr19:15443998-15444017 | CCGCCACACUUGCCUGACGU | + |
| 484 | 58525 | WIZ | intron_03 | chr19:15442748 -15448102 | chr19:15443997-15444016 | CCCGCCACACUUGCCUGACG | + |
| 485 | 58525 | WIZ | intron_03 | chr19:15442748 -15448102 | chr19:15444004-15444023 | UUACCCACGUCAGGCAAGUG | - |
| 486 | 58525 | WIZ | intron_03 | chr19:15442748 -15448102 | chr19:15444001-15444020 | CCCACGUCAGGCAAGUGUGG | - |
| 487 | 58525 | WIZ | intron_03 | chr19:15442748 -15448102 | chr19:15444000-15444019 | CCACGUCAGGCAAGUGUGGC | - |
| 488 | 58525 | WIZ | intron_03 | chr19:15442748 -15448102 | chr19:15443962-15443981 | UGGAGCGACCACAGGAAUCC | + |
| 489 | 58525 | WIZ | intron_03 | chr19:15442748 -15448102 | chr19:15443963-15443982 | AGGAUUCCUGUGGUCGCUCC | - |
| 490 | 58525 | WIZ | intron_03 | chr19:15442748 -15448102 | chr19:15443942-15443961 | CCGCCUGUGGAGCCAAUGCC | + |
| 491 | 58525 | WIZ | intron_03 | chr19:15442748 -15448102 | chr19:15443948-15443967 | GCUCCAGGCAUUGGCUCCAC | - |
| 492 | 58525 | WIZ | intron_03 | chr19:15442748 -15448102 | chr19:15443945-15443964 | CCAGGCAUUGGCUCCACAGG | - |
| 493 | 58525 | WIZ | intron_03 | chr19:15442748 -15448102 | chr19:15443929-15443948 | AACUCUCUAUUAUCCGCCUG | + |
| 494 | 58525 | WIZ | intron_03 | chr19:15442748 -15448102 | chr19:15443877-15443896 | CUGAAAUCCAAUCCCCUCCU | + |
| 495 | 58525 | WIZ | intron_03 | chr19:15442748 -15448102 | chr19:15443879-15443898 | CCAGGAGGGGAUUGGAUUUC | - |
| 496 | 58525 | WIZ | intron_03 | chr19:15442748 -15448102 | chr19:15443825-15443844 | GGAUGGGCUCUCUGCAGCUC | - |
| 497 | 58525 | WIZ | intron_03 | chr19:15442748 -15448102 | chr19:15443787-15443806 | UCCUUGCCAGAUGAUGAACG | + |
| 498 | 58525 | WIZ | intron_03 | chr19:15442748 -15448102 | chr19:15443742-15443761 | CACUGCAGCAUUCUAGCACC | + |
| 499 | 58525 | WIZ | intron_03 | chr19:15442748 -15448102 | chr19:15443712-15443731 | CAGUAGACCAGGUACUUUGU | + |
| 500 | 58525 | WIZ | intron_03 | chr19:15442748 -15448102 | chr19:15443701-15443720 | GCAUGUAGUCACAGUAGACC | + |
| 501 | 58525 | WIZ | intron_03 | chr19:15442748 -15448102 | chr19:15443668-15443687 | UCUUGGGAUGACUGCUUGCU | + |
| 502 | 58525 | WIZ | intron_03 | chr19:15442748 -15448102 | chr19:15443667-15443686 | UUCUUGGGAUGACUGCUUGC | + |
| 503 | 58525 | WIZ | intron_03 | chr19:15442748 -15448102 | chr19:15443640-15443659 | UAGAACUUUCUGAAAUCACC | + |
| 504 | 58525 | WIZ | intron_03 | chr19:15442748 -15448102 | chr19:15443505-15443524 | CAAGCCCACCUAACUCUUUU | + |
| 505 | 58525 | WIZ | intron_03 | chr19:15442748 -15448102 | chr19:15443504-15443523 | CCAAGCCCACCUAACUCUUU | + |
| 506 | 58525 | WIZ | intron_03 | chr19:15442748 -15448102 | chr19:15443476-15443495 | CUGACUGUAUGGGCCUCCUC | + |
| 507 | 58525 | WIZ | intron_03 | chr19:15442748 -15448102 | chr19:15443466-15443485 | UGCCUCCAUUCUGACUGUAU | + |
| 508 | 58525 | WIZ | intron_03 | chr19:15442748 -15448102 | chr19:15443465-15443484 | AUGCCUCCAUUCUGACUGUA | + |
| 509 | 58525 | WIZ | intron_03 | chr19:15442748 -15448102 | chr19:15443392-15443411 | GCCACCUACAAGGCCCUAUG | + |
| 510 | 58525 | WIZ | intron_03 | chr19:15442748 -15448102 | chr19:15443382-15443401 | ACUCUUAGCCGCCACCUACA | + |
| 511 | 58525 | WIZ | intron_03 | chr19:15442748 -15448102 | chr19:15443010-15443029 | GUUUUUUACAAGCCUCACCC | + |
| 512 | 58525 | WIZ | intron_03 | chr19:15442748 -15448102 | chr19:15442925-15442944 | GAGUCCCCUUGGCUCUCCUG | + |
| 513 | 58525 | WIZ | intron_03 | chr19:15442748 -15448102 | chr19:15442934-15442953 | GGGGUCCCCCAGGAGAGCCA | - |
| 514 | 58525 | WIZ | intron_03 | chr19:15442748 -15448102 | chr19:15442932-15442951 | GGUCCCCCAGGAGAGCCAAG | - |
| 515 | 58525 | WIZ | intron_03 | chr19:15442748 -15448102 | chr19:15442900-15442919 | AGCCCUGAAAGGGGUUUCUU | + |
| 516 | 58525 | WIZ | intron_03 | chr19:15442748 -15448102 | chr19:15442906-15442925 | CUUCCAAAGAAACCCCUUUC | - |
| 517 | 58525 | WIZ | intron_03 | chr19:15442748 -15448102 | chr19:15442891-15442910 | GUGGUCCUGAGCCCUGAAAG | + |
| 518 | 58525 | WIZ | intron_03 | chr19:15442748 -15448102 | chr19:15442889-15442908 | UUCAGGGCUCAGGACCACAG | - |
| 519 | 58525 | WIZ | intron_03 | chr19:15442748 -15448102 | chr19:15442873-15442892 | ACAGAGGCCACGGGCCUCUC | - |
| 520 | 58525 | WIZ | intron_03 | chr19:15442748 -15448102 | chr19:15442832-15442851 | GUGCCUCAGAAAGGCCCUGC | + |
| 521 | 58525 | WIZ | intron_03 | chr19:15442748 -15448102 | chr19:15442759-15442778 | GAGGGGAGACCCUGAGGGGC | + |
| 522 | 58525 | WIZ | intron_03 | chr19:15442748 -15448102 | chr19:15442742-15442761 | UGCCCGUCUGCAACAGAGAG | + |
| 523 | 58525 | WIZ | intron_03 | chr19:15442748 -15448102 | chr19:15442741-15442760 | CUGCCCGUCUGCAACAGAGA | + |
| 524 | 58525 | WIZ | exon_04_c | chr19:15442675 -15442748 | chr19:15442733-15442752 | GCAGACGGGCAGCCCCAUCC | - |
| 525 | 58525 | WIZ | exon_04_c | chr19:15442675 -15442748 | chr19:15442718-15442737 | GCUUCGCUGAGGCCGGGAUG | + |
| 526 | 58525 | WIZ | exon_04_c | chr19:15442675 -15442748 | chr19:15442695-15442714 | UGGCGGAGGUGACACGGGGG | + |
| 527 | 58525 | WIZ | exon_04_c | chr19:15442675 -15442748 | chr19:15442692-15442711 | GGGUGGCGGAGGUGACACGG | + |
| 528 | 58525 | WIZ | exon_04_c | chr19:15442675 -15442748 | chr19:15442691-15442710 | UGGGUGGCGGAGGUGACACG | + |
| 529 | 58525 | WIZ | exon_04_c | chr19:15442675 -15442748 | chr19:15442681-15442700 | GCUGAUCCGAUGGGUGGCGG | + |
| 530 | 58525 | WIZ | exon_04_c | chr19:15442675 -15442748 | chr19:15442690-15442709 | GUGUCACCUCCGCCACCCAU | - |
| 531 | 58525 | WIZ | exon_04_c | chr19:15442675 -15442748 | chr19:15442672-15442691 | UCACCAGCUGCUGAUCCGAU | + |
| 532 | 58525 | WIZ | exon_04_c | chr19:15442675 -15442748 | chr19:15442678-15442697 | CCACCCAUCGGAUCAGCAGC | - |
| 533 | 58525 | WIZ | intron_04 | chr19:15440715 -15442675 | chr19:15442592-15442611 | AUUCCCCAGGGGCUUAUCUG | + |
| 534 | 58525 | WIZ | intron_04 | chr19:15440715 -15442675 | chr19:15442518-15442537 | CGCCCAGGGGCUUGCCUGCC | + |
| 535 | 58525 | WIZ | intron_04 | chr19:15440715 -15442675 | chr19:15442523-15442542 | CUCCCGGCAGGCAAGCCCCU | - |
| 536 | 58525 | WIZ | intron_04 | chr19:15440715 -15442675 | chr19:15442505-15442524 | CAACCCCAGCACACGCCCAG | + |
| 537 | 58525 | WIZ | intron_04 | chr19:15440715 -15442675 | chr19:15442504-15442523 | CCAACCCCAGCACACGCCCA | + |
| 538 | 58525 | WIZ | intron_04 | chr19:15440715 -15442675 | chr19:15442481-15442500 | AGGUCUGGAAUGAACACAGA | - |
| 539 | 58525 | WIZ | intron_04 | chr19:15440715 -15442675 | chr19:15442457-15442476 | CAACUCUCAUUAUCCCUGCC | - |
| 540 | 58525 | WIZ | intron_04 | chr19:15440715 -15442675 | chr19:15442409-15442428 | ACUUGAAGGGUCCAACAUCC | + |
| 541 | 58525 | WIZ | intron_04 | chr19:15440715 -15442675 | chr19:15442376-15442395 | GUAUCAUUCUAAGGGUCACC | + |
| 542 | 58525 | WIZ | intron_04 | chr19:15440715 -15442675 | chr19:15442368-15442387 | GAGGCCUAGUAUCAUUCUAA | + |
| 543 | 58525 | WIZ | intron_04 | chr19:15440715 -15442675 | chr19:15442367-15442386 | AGAGGCCUAGUAUCAUUCUA | + |
| 544 | 58525 | WIZ | intron_04 | chr19:15440715 -15442675 | chr19:15442310-15442329 | AAUUCAUGAGAUGCAUCUUA | + |
| 545 | 58525 | WIZ | intron_04 | chr19:15440715 -15442675 | chr19:15442227-15442246 | CAAGCCAUUUAAUAAAGAGU | + |
| 546 | 58525 | WIZ | intron_04 | chr19:15440715 -15442675 | chr19:15442234-15442253 | GGUCCCUACUCUUUAUUAAA | - |
| 547 | 58525 | WIZ | intron_04 | chr19:15440715 -15442675 | chr19:15441884-15441903 | CUGAUAAACUUACUAUGACC | + |
| 548 | 58525 | WIZ | intron_04 | chr19:15440715 -15442675 | chr19:15441752-15441771 | CUAAAAGGACCAUCCUCCUG | + |
| 549 | 58525 | WIZ | intron_04 | chr19:15440715 -15442675 | chr19:15441751-15441770 | ACUAAAAGGACCAUCCUCCU | + |
| 550 | 58525 | WIZ | intron_04 | chr19:15440715 -15442675 | chr19:15441750-15441769 | UACUAAAAGGACCAUCCUCC | + |
| 551 | 58525 | WIZ | intron_04 | chr19:15440715 -15442675 | chr19:15441737-15441756 | CACUGACAUGCGAUACUAAA | + |
| 552 | 58525 | WIZ | intron_04 | chr19:15440715 -15442675 | chr19:15441680-15441699 | GAAAUGUUCCAUUCAGAUGU | + |
| 553 | 58525 | WIZ | intron_04 | chr19:15440715 -15442675 | chr19:15441691-15441710 | GUCUCCACCCAACAUCUGAA | - |
| 554 | 58525 | WIZ | intron_04 | chr19:15440715 -15442675 | chr19:15441658-15441677 | UCACGCUUAUGGAACAGAUG | + |
| 555 | 58525 | WIZ | intron_04 | chr19:15440715 -15442675 | chr19:15441647-15441666 | GGGGAUGCCAAUCACGCUUA | + |
| 556 | 58525 | WIZ | intron_04 | chr19:15440715 -15442675 | chr19:15441657-15441676 | AUCUGUUCCAUAAGCGUGAU | - |
| 557 | 58525 | WIZ | intron_04 | chr19:15440715 -15442675 | chr19:15441644-15441663 | GCGUGAUUGGCAUCCCCUGA | - |
| 558 | 58525 | WIZ | intron_04 | chr19:15440715 -15442675 | chr19:15441637-15441656 | UGGCAUCCCCUGAUGGAGGC | - |
| 559 | 58525 | WIZ | intron_04 | chr19:15440715 -15442675 | chr19:15441590-15441609 | UUAUUAUGACCAUUUGAGAU | + |
| 560 | 58525 | WIZ | intron_04 | chr19:15440715 -15442675 | chr19:15441602-15441621 | AAGGGAGAACCGAUCUCAAA | - |
| 561 | 58525 | WIZ | intron_04 | chr19:15440715 -15442675 | chr19:15441580-15441599 | GUCAUAAUAAGAACCCACAC | - |
| 562 | 58525 | WIZ | intron_04 | chr19:15440715 -15442675 | chr19:15441499-15441518 | CAAUGACCCCGCAGGGUGUA | + |
| 563 | 58525 | WIZ | intron_04 | chr19:15440715 -15442675 | chr19:15441498-15441517 | UCAAUGACCCCGCAGGGUGU | + |
| 564 | 58525 | WIZ | intron_04 | chr19:15440715 -15442675 | chr19:15441508-15441527 | UCUUCACCCUACACCCUGCG | - |
| 565 | 58525 | WIZ | intron_04 | chr19:15440715 -15442675 | chr19:15441492-15441511 | AACCUUUCAAUGACCCCGCA | + |
| 566 | 58525 | WIZ | intron_04 | chr19:15440715 -15442675 | chr19:15441491-15441510 | CAACCUUUCAAUGACCCCGC | + |
| 567 | 58525 | WIZ | intron_04 | chr19:15440715 -15442675 | chr19:15441497-15441516 | CACCCUGCGGGGUCAUUGAA | - |
| 568 | 58525 | WIZ | intron_04 | chr19:15440715 -15442675 | chr19:15441440-15441459 | CAAAAGGUGCUUGCAACACA | + |
| 569 | 58525 | WIZ | intron_04 | chr19:15440715 -15442675 | chr19:15441433-15441452 | CAAGCACCUUUUGUUGAUGA | - |
| 570 | 58525 | WIZ | intron_04 | chr19:15440715 -15442675 | chr19:15441394-15441413 | UUGUCCUUAUACAACAUCUG | + |
| 571 | 58525 | WIZ | intron_04 | chr19:15440715 -15442675 | chr19:15441401-15441420 | AGCUCCACAGAUGUUGUAUA | - |
| 572 | 58525 | WIZ | intron_04 | chr19:15440715 -15442675 | chr19:15441392-15441411 | GAUGUUGUAUAAGGACAAAG | - |
| 573 | 58525 | WIZ | intron_04 | chr19:15440715 -15442675 | chr19:15441378-15441397 | ACAAAGGGGUUCCCAGUUCU | - |
| 574 | 58525 | WIZ | intron_04 | chr19:15440715 -15442675 | chr19:15441377-15441396 | CAAAGGGGUUCCCAGUUCUU | - |
| 575 | 58525 | WIZ | intron_04 | chr19:15440715 -15442675 | chr19:15441363-15441382 | UGGGGGUAAUUCCCAAGAAC | + |
| 576 | 58525 | WIZ | intron_04 | chr19:15440715 -15442675 | chr19:15441281-15441300 | GACCUUCUUGGGCAGAGGGG | + |
| 577 | 58525 | WIZ | intron_04 | chr19:15440715 -15442675 | chr19:15441278-15441297 | CCUGACCUUCUUGGGCAGAG | + |
| 578 | 58525 | WIZ | intron_04 | chr19:15440715 -15442675 | chr19:15441277-15441296 | UCCUGACCUUCUUGGGCAGA | + |
| 579 | 58525 | WIZ | intron_04 | chr19:15440715 -15442675 | chr19:15441269-15441288 | CCCAGUGAUCCUGACCUUCU | + |
| 580 | 58525 | WIZ | intron_04 | chr19:15440715 -15442675 | chr19:15441281-15441300 | CCCCUCUGCCCAAGAAGGUC | - |
| 581 | 58525 | WIZ | intron_04 | chr19:15440715 -15442675 | chr19:15441273-15441292 | CCCAAGAAGGUCAGGAUCAC | - |
| 582 | 58525 | WIZ | intron_04 | chr19:15440715 -15442675 | chr19:15441272-15441291 | CCAAGAAGGUCAGGAUCACU | - |
| 583 | 58525 | WIZ | intron_04 | chr19:15440715 -15442675 | chr19:15441264-15441283 | GUCAGGAUCACUGGGGCCAA | - |
| 584 | 58525 | WIZ | intron_04 | chr19:15440715 -15442675 | chr19:15441255-15441274 | ACUGGGGCCAAAGGCUUAGC | - |
| 585 | 58525 | WIZ | intron_04 | chr19:15440715 -15442675 | chr19:15441207-15441226 | CUUUCUGGAGGGGGAGAUGC | - |
| 586 | 58525 | WIZ | intron_04 | chr19:15440715 -15442675 | chr19:15441152-15441171 | AGAUUUGGCGAUUAACUUUG | + |
| 587 | 58525 | WIZ | intron_04 | chr19:15440715 -15442675 | chr19:15441153-15441172 | ACAAAGUUAAUCGCCAAAUC | - |
| 588 | 58525 | WIZ | intron_04 | chr19:15440715 -15442675 | chr19:15441152-15441171 | CAAAGUUAAUCGCCAAAUCU | - |
| 589 | 58525 | WIZ | intron_04 | chr19:15440715 -15442675 | chr19:15441151-15441170 | AAAGUUAAUCGCCAAAUCUG | - |
| 590 | 58525 | WIZ | intron_04 | chr19:15440715 -15442675 | chr19:15441150-15441169 | AAGUUAAUCGCCAAAUCUGG | - |
| 591 | 58525 | WIZ | intron_04 | chr19:15440715 -15442675 | chr19:15441145-15441164 | AAUCGCCAAAUCUGGGGGAG | - |
| 592 | 58525 | WIZ | intron_04 | chr19:15440715 -15442675 | chr19:15441112-15441131 | UUAGCAAAAUCACCCCAGUU | - |
| 593 | 58525 | WIZ | intron_04 | chr19:15440715 -15442675 | chr19:15441111-15441130 | UAGCAAAAUCACCCCAGUUU | - |
| 594 | 58525 | WIZ | intron_04 | chr19:15440715 -15442675 | chr19:15441096-15441115 | GUCUUGGUUCUCCCCAAACU | + |
| 595 | 58525 | WIZ | intron_04 | chr19:15440715 -15442675 | chr19:15441095-15441114 | UGUCUUGGUUCUCCCCAAAC | + |
| 596 | 58525 | WIZ | intron_04 | chr19:15440715 -15442675 | chr19:15441065-15441084 | AAGCCUCUCAUCUGUGCUCC | + |
| 597 | 58525 | WIZ | intron_04 | chr19:15440715 -15442675 | chr19:15441006-15441025 | GCCACCUCUAAGAAGUCUGG | + |
| 598 | 58525 | WIZ | intron_04 | chr19:15440715 -15442675 | chr19:15440987-15441006 | CCACAUCCCCGUGUGGCCCA | - |
| 599 | 58525 | WIZ | intron_04 | chr19:15440715 -15442675 | chr19:15440986-15441005 | CACAUCCCCGUGUGGCCCAG | - |
| 600 | 58525 | WIZ | intron_04 | chr19:15440715 -15442675 | chr19:15440968-15440987 | AAUGUACGGAGACCACCCCU | + |
| 601 | 58525 | WIZ | intron_04 | chr19:15440715 -15442675 | chr19:15440967-15440986 | GAAUGUACGGAGACCACCCC | + |
| 602 | 58525 | WIZ | intron_04 | chr19:15440715 -15442675 | chr19:15440945-15440964 | CUAGCCCCGCUGCAUUGUGG | + |
| 603 | 58525 | WIZ | intron_04 | chr19:15440715 -15442675 | chr19:15440944-15440963 | CCUAGCCCCGCUGCAUUGUG | + |
| 604 | 58525 | WIZ | intron_04 | chr19:15440715 -15442675 | chr19:15440943-15440962 | GCCUAGCCCCGCUGCAUUGU | + |
| 605 | 58525 | WIZ | intron_04 | chr19:15440715 -15442675 | chr19:15440942-15440961 | AGCCUAGCCCCGCUGCAUUG | + |
| 606 | 58525 | WIZ | intron_04 | chr19:15440715 -15442675 | chr19:15440953-15440972 | ACAUUCCCCCACAAUGCAGC | - |
| 607 | 58525 | WIZ | intron_04 | chr19:15440715 -15442675 | chr19:15440939-15440958 | UGCAGCGGGGCUAGGCUUUG | - |
| 608 | 58525 | WIZ | intron_04 | chr19:15440715 -15442675 | chr19:15440911-15440930 | UGCAUCCUAGGAGUUGAACC | - |
| 609 | 58525 | WIZ | intron_04 | chr19:15440715 -15442675 | chr19:15440890-15440909 | GACCUAUCGGGUCAAAAGCC | + |
| 610 | 58525 | WIZ | intron_04 | chr19:15440715 -15442675 | chr19:15440895-15440914 | AACCUGGCUUUUGACCCGAU | - |
| 611 | 58525 | WIZ | intron_04 | chr19:15440715 -15442675 | chr19:15440878-15440897 | UGGAUCCUUCCGGACCUAUC | + |
| 612 | 58525 | WIZ | intron_04 | chr19:15440715 -15442675 | chr19:15440877-15440896 | GUGGAUCCUUCCGGACCUAU | + |
| 613 | 58525 | WIZ | intron_04 | chr19:15440715 -15442675 | chr19:15440890-15440909 | GGCUUUUGACCCGAUAGGUC | - |
| 614 | 58525 | WIZ | intron_04 | chr19:15440715 -15442675 | chr19:15440886-15440905 | UUUGACCCGAUAGGUCCGGA | - |
| 615 | 58525 | WIZ | intron_04 | chr19:15440715 -15442675 | chr19:15440868-15440887 | GGAGUCCACGUGGAUCCUUC | + |
| 616 | 58525 | WIZ | intron_04 | chr19:15440715 -15442675 | chr19:15440876-15440895 | UAGGUCCGGAAGGAUCCACG | - |
| 617 | 58525 | WIZ | intron_04 | chr19:15440715 -15442675 | chr19:15440825-15440844 | CCCGAGGGUGACAGGGGUGU | + |
| 618 | 58525 | WIZ | intron_04 | chr19:15440715 -15442675 | chr19:15440819-15440838 | AUCCAGCCCGAGGGUGACAG | + |
| 619 | 58525 | WIZ | intron_04 | chr19:15440715 -15442675 | chr19:15440818-15440837 | GAUCCAGCCCGAGGGUGACA | + |
| 620 | 58525 | WIZ | intron_04 | chr19:15440715 -15442675 | chr19:15440817-15440836 | AGAUCCAGCCCGAGGGUGAC | + |
| 621 | 58525 | WIZ | intron_04 | chr19:15440715 -15442675 | chr19:15440810-15440829 | GCCCCGGAGAUCCAGCCCGA | + |
| 622 | 58525 | WIZ | intron_04 | chr19:15440715 -15442675 | chr19:15440809-15440828 | GGCCCCGGAGAUCCAGCCCG | + |
| 623 | 58525 | WIZ | intron_04 | chr19:15440715 -15442675 | chr19:15440794-15440813 | AGGCCGUUUGAAGCAGGCCC | + |
| 624 | 58525 | WIZ | intron_04 | chr19:15440715 -15442675 | chr19:15440788-15440807 | CCUCCCAGGCCGUUUGAAGC | + |
| 625 | 58525 | WIZ | intron_04 | chr19:15440715 -15442675 | chr19:15440800-15440819 | UCUCCGGGGCCUGCUUCAAA | - |
| 626 | 58525 | WIZ | intron_04 | chr19:15440715 -15442675 | chr19:15440795-15440814 | GGGGCCUGCUUCAAACGGCC | - |
| 627 | 58525 | WIZ | intron_04 | chr19:15440715 -15442675 | chr19:15440794-15440813 | GGGCCUGCUUCAAACGGCCU | - |
| 628 | 58525 | WIZ | intron_04 | chr19:15440715 -15442675 | chr19:15440791-15440810 | CCUGCUUCAAACGGCCUGGG | - |
| 629 | 58525 | WIZ | intron_04 | chr19:15440715 -15442675 | chr19:15440774-15440793 | GUGGUGAUGGGGGUCCUCCC | + |
| 630 | 58525 | WIZ | intron_04 | chr19:15440715 -15442675 | chr19:15440762-15440781 | UUCCUUCCUAGGGUGGUGAU | + |
| 631 | 58525 | WIZ | intron_04 | chr19:15440715 -15442675 | chr19:15440761-15440780 | UUUCCUUCCUAGGGUGGUGA | + |
| 632 | 58525 | WIZ | intron_04 | chr19:15440715 -15442675 | chr19:15440767-15440786 | CCCCCAUCACCACCCUAGGA | - |
| 633 | 58525 | WIZ | intron_04 | chr19:15440715 -15442675 | chr19:15440731-15440750 | AAUGGGGACAGGUUAGCCAU | + |
| 634 | 58525 | WIZ | intron_04 | chr19:15440715 -15442675 | chr19:15440732-15440751 | CAUGGCUAACCUGUCCCCAU | - |
| 635 | 58525 | WIZ | intron_04 | chr19:15440715 -15442675 | chr19:15440715-15440734 | GCUGCAAGGAAGUGCCAAUG | + |
| 636 | 58525 | WIZ | intron_04 | chr19:15440715 -15442675 | chr19:15440714-15440733 | AGCUGCAAGGAAGUGCCAAU | + |
| 637 | 58525 | WIZ | exon_05_c | chr19:15438577 -15440715 | chr19:15440711-15440730 | GGCACUUCCUUGCAGCUGCU | - |
| 638 | 58525 | WIZ | exon_05_c | chr19:15438577 -15440715 | chr19:15440683-15440702 | GGCAGCCUGGACUUCCGGCC | - |
| 639 | 58525 | WIZ | exon_05_c | chr19:15438577 -15440715 | chr19:15440639-15440658 | GGGUACCUGGGAAAUGGCCC | + |
| 640 | 58525 | WIZ | exon_05_c | chr19:15438577 -15440715 | chr19:15440627-15440646 | CCCGGCCAUCAGGGGUACCU | + |
| 641 | 58525 | WIZ | exon_05_c | chr19:15438577 -15440715 | chr19:15440628-15440647 | CAGGUACCCCUGAUGGCCGG | - |
| 642 | 58525 | WIZ | exon_05_c | chr19:15438577 -15440715 | chr19:15440603-15440622 | CUGGGAGCACCCCCUUGUCC | - |
| 643 | 58525 | WIZ | exon_05_c | chr19:15438577 -15440715 | chr19:15440600-15440619 | GGAGCACCCCCUUGUCCAGG | - |
| 644 | 58525 | WIZ | exon_05_c | chr19:15438577 -15440715 | chr19:15440561-15440580 | CCUCGAAUCUCCGCUCAGAU | + |
| 645 | 58525 | WIZ | exon_05_c | chr19:15438577 -15440715 | chr19:15440564-15440583 | CCUAUCUGAGCGGAGAUUCG | - |
| 646 | 58525 | WIZ | exon_05_c | chr19:15438577 -15440715 | chr19:15440520-15440539 | UAGCUCAGCGUGGGGUUUCA | + |
| 647 | 58525 | WIZ | exon_05_c | chr19:15438577 -15440715 | chr19:15440519-15440538 | GAAACCCCACGCUGAGCUAG | - |
| 648 | 58525 | WIZ | exon_05_c | chr19:15438577 -15440715 | chr19:15440518-15440537 | AAACCCCACGCUGAGCUAGA | - |
| 649 | 58525 | WIZ | exon_05_c | chr19:15438577 -15440715 | chr19:15440508-15440527 | CUGAGCUAGAGGGCUCUAGA | - |
| 650 | 58525 | WIZ | exon_05_c | chr19:15438577 -15440715 | chr19:15440493-15440512 | CUAGAAGGUUCUUACACCAC | - |
| 651 | 58525 | WIZ | exon_05_c | chr19:15438577 -15440715 | chr19:15440492-15440511 | UAGAAGGUUCUUACACCACC | - |
| 652 | 58525 | WIZ | exon_05_c | chr19:15438577 -15440715 | chr19:15440491-15440510 | AGAAGGUUCUUACACCACCG | - |
| 653 | 58525 | WIZ | exon_05_c | chr19:15438577 -15440715 | chr19:15440490-15440509 | GAAGGUUCUUACACCACCGG | - |
| 654 | 58525 | WIZ | exon_05_c | chr19:15438577 -15440715 | chr19:15440489-15440508 | AAGGUUCUUACACCACCGGG | - |
| 655 | 58525 | WIZ | exon_05_c | chr19:15438577 -15440715 | chr19:15440458-15440477 | CUUUUGGAGAAACAUGCCCA | - |
| 656 | 58525 | WIZ | exon_05_c | chr19:15438577 -15440715 | chr19:15440439-15440458 | GUCGAACCUGGGGCGGCCCU | + |
| 657 | 58525 | WIZ | exon_05_c | chr19:15438577 -15440715 | chr19:15440438-15440457 | AGUCGAACCUGGGGCGGCCC | + |
| 658 | 58525 | WIZ | exon_05_c | chr19:15438577 -15440715 | chr19:15440448-15440467 | AACAUGCCCAGGGCCGCCCC | - |
| 659 | 58525 | WIZ | exon_05_c | chr19:15438577 -15440715 | chr19:15440432-15440451 | GGAGCCAGUCGAACCUGGGG | + |
| 660 | 58525 | WIZ | exon_05_c | chr19:15438577 -15440715 | chr19:15440429-15440448 | CUUGGAGCCAGUCGAACCUG | + |
| 661 | 58525 | WIZ | exon_05_c | chr19:15438577 -15440715 | chr19:15440428-15440447 | UCUUGGAGCCAGUCGAACCU | + |
| 662 | 58525 | WIZ | exon_05_c | chr19:15438577 -15440715 | chr19:15440439-15440458 | AGGGCCGCCCCAGGUUCGAC | - |
| 663 | 58525 | WIZ | exon_05_c | chr19:15438577 -15440715 | chr19:15440426-15440445 | GUUCGACUGGCUCCAAGAUG | - |
| 664 | 58525 | WIZ | exon_05_c | chr19:15438577 -15440715 | chr19:15440411-15440430 | AUCCCUGCUCGUCCUCAUCU | + |
| 665 | 58525 | WIZ | exon_05_c | chr19:15438577 -15440715 | chr19:15440417-15440436 | GCUCCAAGAUGAGGACGAGC | - |
| 666 | 58525 | WIZ | exon_05_c | chr19:15438577 -15440715 | chr19:15440405-15440424 | GGACGAGCAGGGAUCCCCCC | - |
| 667 | 58525 | WIZ | exon_05_c | chr19:15438577 -15440715 | chr19:15440386-15440405 | AAGUGCAGCCCUGCGUCCUG | + |
| 668 | 58525 | WIZ | exon_05_c | chr19:15438577 -15440715 | chr19:15440385-15440404 | CAAGUGCAGCCCUGCGUCCU | + |
| 669 | 58525 | WIZ | exon_05_c | chr19:15438577 -15440715 | chr19:15440397-15440416 | AGGGAUCCCCCCAGGACGCA | - |
| 670 | 58525 | WIZ | exon_05_c | chr19:15438577 -15440715 | chr19:15440387-15440406 | CCAGGACGCAGGGCUGCACU | - |
| 671 | 58525 | WIZ | exon_05_c | chr19:15438577 -15440715 | chr19:15440344-15440363 | CUCCUGAAGGGGGCGAGGGG | + |
| 672 | 58525 | WIZ | exon_05_c | chr19:15438577 -15440715 | chr19:15440339-15440358 | ACACCCUCCUGAAGGGGGCG | + |
| 673 | 58525 | WIZ | exon_05_c | chr19:15438577 -15440715 | chr19:15440333-15440352 | GCACAAACACCCUCCUGAAG | + |
| 674 | 58525 | WIZ | exon_05_c | chr19:15438577 -15440715 | chr19:15440332-15440351 | GGCACAAACACCCUCCUGAA | + |
| 675 | 58525 | WIZ | exon_05_c | chr19:15438577 -15440715 | chr19:15440345-15440364 | ACCCCUCGCCCCCUUCAGGA | - |
| 676 | 58525 | WIZ | exon_05_c | chr19:15438577 -15440715 | chr19:15440330-15440349 | CAGGAGGGUGUUUGUGCCAG | - |
| 677 | 58525 | WIZ | exon_05_c | chr19:15438577 -15440715 | chr19:15440311-15440330 | GUCUUCGGGGUGUCUUCCAC | + |
| 678 | 58525 | WIZ | exon_05_c | chr19:15438577 -15440715 | chr19:15440298-15440317 | CGCCAUGUCCAGCGUCUUCG | + |
| 679 | 58525 | WIZ | exon_05_c | chr19:15438577 -15440715 | chr19:15440297-15440316 | CCGCCAUGUCCAGCGUCUUC | + |
| 680 | 58525 | WIZ | exon_05_c | chr19:15438577 -15440715 | chr19:15440296-15440315 | ACCGCCAUGUCCAGCGUCUU | + |
| 681 | 58525 | WIZ | exon_05_c | chr19:15438577 -15440715 | chr19:15440309-15440328 | GGAAGACACCCCGAAGACGC | - |
| 682 | 58525 | WIZ | exon_05_c | chr19:15438577 -15440715 | chr19:15440303-15440322 | CACCCCGAAGACGCUGGACA | - |
| 683 | 58525 | WIZ | exon_05_c | chr19:15438577 -15440715 | chr19:15440300-15440319 | CCCGAAGACGCUGGACAUGG | - |
| 684 | 58525 | WIZ | exon_05_c | chr19:15438577 -15440715 | chr19:15440297-15440316 | GAAGACGCUGGACAUGGCGG | - |
| 685 | 58525 | WIZ | exon_05_c | chr19:15438577 -15440715 | chr19:15440294-15440313 | GACGCUGGACAUGGCGGUGG | - |
| 686 | 58525 | WIZ | exon_05_c | chr19:15438577 -15440715 | chr19:15440293-15440312 | ACGCUGGACAUGGCGGUGGU | - |
| 687 | 58525 | WIZ | exon_05_c | chr19:15438577 -15440715 | chr19:15440232-15440251 | UAGGCCCCACUCGGACGGCU | + |
| 688 | 58525 | WIZ | exon_05_c | chr19:15438577 -15440715 | chr19:15440231-15440250 | GUAGGCCCCACUCGGACGGC | + |
| 689 | 58525 | WIZ | exon_05_c | chr19:15438577 -15440715 | chr19:15440241-15440260 | GGCUGGCCCAGCCGUCCGAG | - |
| 690 | 58525 | WIZ | exon_05_c | chr19:15438577 -15440715 | chr19:15440227-15440246 | GUGGGUAGGCCCCACUCGGA | + |
| 691 | 58525 | WIZ | exon_05_c | chr19:15438577 -15440715 | chr19:15440240-15440259 | GCUGGCCCAGCCGUCCGAGU | - |
| 692 | 58525 | WIZ | exon_05_c | chr19:15438577 -15440715 | chr19:15440239-15440258 | CUGGCCCAGCCGUCCGAGUG | - |
| 693 | 58525 | WIZ | exon_05_c | chr19:15438577 -15440715 | chr19:15440223-15440242 | UGACGUGGGUAGGCCCCACU | + |
| 694 | 58525 | WIZ | exon_05_c | chr19:15438577 -15440715 | chr19:15440213-15440232 | CCUCCGAGGCUGACGUGGGU | + |
| 695 | 58525 | WIZ | exon_05_c | chr19:15438577 -15440715 | chr19:15440208-15440227 | GGCUACCUCCGAGGCUGACG | + |
| 696 | 58525 | WIZ | exon_05_c | chr19:15438577 -15440715 | chr19:15440216-15440235 | CCUACCCACGUCAGCCUCGG | - |
| 697 | 58525 | WIZ | exon_05_c | chr19:15438577 -15440715 | chr19:15440199-15440218 | GGUCUGUGUGGCUACCUCCG | + |
| 698 | 58525 | WIZ | exon_05_c | chr19:15438577 -15440715 | chr19:15440199-15440218 | CGGAGGUAGCCACACAGACC | - |
| 699 | 58525 | WIZ | exon_05_c | chr19:15438577 -15440715 | chr19:15440178-15440197 | AGCCUCCGAGUUCACUGUCC | + |
| 700 | 58525 | WIZ | exon_05_c | chr19:15438577 -15440715 | chr19:15440174-15440193 | AGUGAACUCGGAGGCUUCUG | - |
| 701 | 58525 | WIZ | exon_05_c | chr19:15438577 -15440715 | chr19:15440169-15440188 | ACUCGGAGGCUUCUGUGGAG | - |
| 702 | 58525 | WIZ | exon_05_c | chr19:15438577 -15440715 | chr19:15440137-15440156 | GUCCGGAUCGGGGGCAGUAG | + |
| 703 | 58525 | WIZ | exon_05_c | chr19:15438577 -15440715 | chr19:15440142-15440161 | AGCCGCUACUGCCCCCGAUC | - |
| 704 | 58525 | WIZ | exon_05_c | chr19:15438577 -15440715 | chr19:15440128-15440147 | UAGGGCCCGGUCCGGAUCGG | + |
| 705 | 58525 | WIZ | exon_05_c | chr19:15438577 -15440715 | chr19:15440127-15440146 | GUAGGGCCCGGUCCGGAUCG | + |
| 706 | 58525 | WIZ | exon_05_c | chr19:15438577 -15440715 | chr19:15440126-15440145 | GGUAGGGCCCGGUCCGGAUC | + |
| 707 | 58525 | WIZ | exon_05_c | chr19:15438577 -15440715 | chr19:15440125-15440144 | AGGUAGGGCCCGGUCCGGAU | + |
| 708 | 58525 | WIZ | exon_05_c | chr19:15438577 -15440715 | chr19:15440137-15440156 | CUACUGCCCCCGAUCCGGAC | - |
| 709 | 58525 | WIZ | exon_05_c | chr19:15438577 -15440715 | chr19:15440136-15440155 | UACUGCCCCCGAUCCGGACC | - |
| 710 | 58525 | WIZ | exon_05_c | chr19:15438577 -15440715 | chr19:15440120-15440139 | CACACAGGUAGGGCCCGGUC | + |
| 711 | 58525 | WIZ | exon_05_c | chr19:15438577 -15440715 | chr19:15440115-15440134 | CAGCUCACACAGGUAGGGCC | + |
| 712 | 58525 | WIZ | exon_05_c | chr19:15438577 -15440715 | chr19:15440110-15440129 | UCCAGCAGCUCACACAGGUA | + |
| 713 | 58525 | WIZ | exon_05_c | chr19:15438577 -15440715 | chr19:15440114-15440133 | GCCCUACCUGUGUGAGCUGC | - |
| 714 | 58525 | WIZ | exon_05_c | chr19:15438577 -15440715 | chr19:15440078-15440097 | AGGGGUGGCCAGCCCAGAUG | - |
| 715 | 58525 | WIZ | exon_05_c | chr19:15438577 -15440715 | chr19:15440038-15440057 | UCGAUGCAUGGGAACACGGC | + |
| 716 | 58525 | WIZ | exon_05_c | chr19:15438577 -15440715 | chr19:15440034-15440053 | GCACUCGAUGCAUGGGAACA | + |
| 717 | 58525 | WIZ | exon_05_c | chr19:15438577 -15440715 | chr19:15440027-15440046 | AGAUGCUGCACUCGAUGCAU | + |
| 718 | 58525 | WIZ | exon_05_c | chr19:15438577 -15440715 | chr19:15440026-15440045 | UAGAUGCUGCACUCGAUGCA | + |
| 719 | 58525 | WIZ | exon_05_c | chr19:15438577 -15440715 | chr19:15439967-15439986 | GGCCCGGGGCUCGGCGGUGC | + |
| 720 | 58525 | WIZ | exon_05_c | chr19:15438577 -15440715 | chr19:15439972-15439991 | AGCCAGCACCGCCGAGCCCC | - |
| 721 | 58525 | WIZ | exon_05_c | chr19:15438577 -15440715 | chr19:15439951-15439970 | UCCGCAGGGGGCUCCUGGCC | + |
| 722 | 58525 | WIZ | exon_05_c | chr19:15438577 -15440715 | chr19:15439936-15439955 | GCCAGCGGGGCCAGGUCCGC | + |
| 723 | 58525 | WIZ | exon_05_c | chr19:15438577 -15440715 | chr19:15439923-15439942 | ACACUCCCCGCAGGCCAGCG | + |
| 724 | 58525 | WIZ | exon_05_c | chr19:15438577 -15440715 | chr19:15439921-15439940 | CCACACUCCCCGCAGGCCAG | + |
| 725 | 58525 | WIZ | exon_05_c | chr19:15438577 -15440715 | chr19:15439882-15439901 | CGGUGCUGCUCCAGGGCAGU | + |
| 726 | 58525 | WIZ | exon_05_c | chr19:15438577 -15440715 | chr19:15439847-15439866 | CUCCCGGGAGAAGAUCAUUG | - |
| 727 | 58525 | WIZ | exon_05_c | chr19:15438577 -15440715 | chr19:15439811-15439830 | GAAGCAAGUUCCAGGAGACG | - |
| 728 | 58525 | WIZ | exon_05_c | chr19:15438577 -15440715 | chr19:15439810-15439829 | AAGCAAGUUCCAGGAGACGA | - |
| 729 | 58525 | WIZ | exon_05_c | chr19:15438577 -15440715 | chr19:15439802-15439821 | UCCAGGAGACGAGGGCCGGG | - |
| 730 | 58525 | WIZ | exon_05_c | chr19:15438577 -15440715 | chr19:15439743-15439762 | CACAUAGGCCCUGGAUGAAU | + |
| 731 | 58525 | WIZ | exon_05_c | chr19:15438577 -15440715 | chr19:15439755-15439774 | UCUUUGGCACCAAUUCAUCC | - |
| 732 | 58525 | WIZ | exon_05_c | chr19:15438577 -15440715 | chr19:15439734-15439753 | GGCAUGCUGCACAUAGGCCC | + |
| 733 | 58525 | WIZ | exon_05_c | chr19:15438577 -15440715 | chr19:15439728-15439747 | CAGCUUGGCAUGCUGCACAU | + |
| 734 | 58525 | WIZ | exon_05_c | chr19:15438577 -15440715 | chr19:15439713-15439732 | GGGCUCACGCAUGUGCAGCU | + |
| 735 | 58525 | WIZ | exon_05_c | chr19:15438577 -15440715 | chr19:15439711-15439730 | CUGCACAUGCGUGAGCCCCC | - |
| 736 | 58525 | WIZ | exon_05_c | chr19:15438577 -15440715 | chr19:15439693-15439712 | UCUUUGGUGGUCUGGCCUGG | + |
| 737 | 58525 | WIZ | exon_05_c | chr19:15438577 -15440715 | chr19:15439690-15439709 | GGCUCUUUGGUGGUCUGGCC | + |
| 738 | 58525 | WIZ | exon_05_c | chr19:15438577 -15440715 | chr19:15439685-15439704 | CAAAAGGCUCUUUGGUGGUC | + |
| 739 | 58525 | WIZ | exon_05_c | chr19:15438577 -15440715 | chr19:15439680-15439699 | GCCUCCAAAAGGCUCUUUGG | + |
| 740 | 58525 | WIZ | exon_05_c | chr19:15438577 -15440715 | chr19:15439677-15439696 | GCUGCCUCCAAAAGGCUCUU | + |
| 741 | 58525 | WIZ | exon_05_c | chr19:15438577 -15440715 | chr19:15439684-15439703 | ACCACCAAAGAGCCUUUUGG | - |
| 742 | 58525 | WIZ | exon_05_c | chr19:15438577 -15440715 | chr19:15439639-15439658 | AGGGCGCUGGCCUCAGGGCU | + |
| 743 | 58525 | WIZ | exon_05_c | chr19:15438577 -15440715 | chr19:15439619-15439638 | CUCCGUAGGGCUGAUAGAGG | + |
| 744 | 58525 | WIZ | exon_05_c | chr19:15438577 -15440715 | chr19:15439624-15439643 | GCCCUCCUCUAUCAGCCCUA | - |
| 745 | 58525 | WIZ | exon_05_c | chr19:15438577 -15440715 | chr19:15439586-15439605 | CACAGAAGACACAGGCGCUG | + |
| 746 | 58525 | WIZ | exon_05_c | chr19:15438577 -15440715 | chr19:15439578-15439597 | GGGGAAACCACAGAAGACAC | + |
| 747 | 58525 | WIZ | exon_05_c | chr19:15438577 -15440715 | chr19:15439559-15439578 | GCAGGCUCUCGCUGGGCGCG | + |
| 748 | 58525 | WIZ | exon_05_c | chr19:15438577 -15440715 | chr19:15439557-15439576 | CGCCCAGCGAGAGCCUGCUC | - |
| 749 | 58525 | WIZ | exon_05_c | chr19:15438577 -15440715 | chr19:15439556-15439575 | GCCCAGCGAGAGCCUGCUCA | - |
| 750 | 58525 | WIZ | exon_05_c | chr19:15438577 -15440715 | chr19:15439545-15439564 | GCCUGCUCAGGGAGCACGUG | - |
| 751 | 58525 | WIZ | exon_05_c | chr19:15438577 -15440715 | chr19:15439504-15439523 | UCGCCAUCCUCCUCCCAGUG | + |
| 752 | 58525 | WIZ | exon_05_c | chr19:15438577 -15440715 | chr19:15439503-15439522 | CUCGCCAUCCUCCUCCCAGU | + |
| 753 | 58525 | WIZ | exon_05_c | chr19:15438577 -15440715 | chr19:15439502-15439521 | CCUCGCCAUCCUCCUCCCAG | + |
| 754 | 58525 | WIZ | exon_05_c | chr19:15438577 -15440715 | chr19:15439453-15439472 | UGAGCAUCCUGGCUAGUGCC | + |
| 755 | 58525 | WIZ | exon_05_c | chr19:15438577 -15440715 | chr19:15439421-15439440 | AGUAGUCCACAGCAGUGUCA | + |
| 756 | 58525 | WIZ | exon_05_c | chr19:15438577 -15440715 | chr19:15439420-15439439 | AAGUAGUCCACAGCAGUGUC | + |
| 757 | 58525 | WIZ | exon_05_c | chr19:15438577 -15440715 | chr19:15439420-15439439 | GACACUGCUGUGGACUACUU | - |
| 758 | 58525 | WIZ | exon_05_c | chr19:15438577 -15440715 | chr19:15439374-15439393 | AGGGUUCUCCCGCCACAUGG | + |
| 759 | 58525 | WIZ | exon_05_c | chr19:15438577 -15440715 | chr19:15439373-15439392 | CAGGGUUCUCCCGCCACAUG | + |
| 760 | 58525 | WIZ | exon_05_c | chr19:15438577 -15440715 | chr19:15439386-15439405 | CGUCCUUGGCCCCCAUGUGG | - |
| 761 | 58525 | WIZ | exon_05_c | chr19:15438577 -15440715 | chr19:15439372-15439391 | GCAGGGUUCUCCCGCCACAU | + |
| 762 | 58525 | WIZ | exon_05_c | chr19:15438577 -15440715 | chr19:15439371-15439390 | AGCAGGGUUCUCCCGCCACA | + |
| 763 | 58525 | WIZ | exon_05_c | chr19:15438577 -15440715 | chr19:15439355-15439374 | UGCUGGAUACGACCCCAGCC | - |
| 764 | 58525 | WIZ | exon_05_c | chr19:15438577 -15440715 | chr19:15439321-15439340 | AUGCUCAGCUGCUGGCAUCC | + |
| 765 | 58525 | WIZ | exon_05_c | chr19:15438577 -15440715 | chr19:15439288-15439307 | CUGUCAAAGCCACUCCUGCA | - |
| 766 | 58525 | WIZ | exon_05_c | chr19:15438577 -15440715 | chr19:15439271-15439290 | GCCUCUGGCCCGUGCCAUGC | + |
| 767 | 58525 | WIZ | exon_05_c | chr19:15438577 -15440715 | chr19:15439275-15439294 | UCCUGCAUGGCACGGGCCAG | - |
| 768 | 58525 | WIZ | exon_05_c | chr19:15438577 -15440715 | chr19:15439267-15439286 | GGCACGGGCCAGAGGCCUCU | - |
| 769 | 58525 | WIZ | exon_05_c | chr19:15438577 -15440715 | chr19:15439263-15439282 | CGGGCCAGAGGCCUCUCGGA | - |
| 770 | 58525 | WIZ | exon_05_c | chr19:15438577 -15440715 | chr19:15439249-15439268 | GGAAAGGCCAGCCUUCCGAG | + |
| 771 | 58525 | WIZ | exon_05_c | chr19:15438577 -15440715 | chr19:15439209-15439228 | CCCGAGCUGUAAGGAGUAGG | + |
| 772 | 58525 | WIZ | exon_05_c | chr19:15438577 -15440715 | chr19:15439207-15439226 | CUCCCGAGCUGUAAGGAGUA | + |
| 773 | 58525 | WIZ | exon_05_c | chr19:15438577 -15440715 | chr19:15439206-15439225 | UCUCCCGAGCUGUAAGGAGU | + |
| 774 | 58525 | WIZ | exon_05_c | chr19:15438577 -15440715 | chr19:15439213-15439232 | ACCCCCUACUCCUUACAGCU | - |
| 775 | 58525 | WIZ | exon_05_c | chr19:15438577 -15440715 | chr19:15439183-15439202 | AAAAGCACCGUCCACCCACA | - |
| 776 | 58525 | WIZ | exon_05_c | chr19:15438577 -15440715 | chr19:15439182-15439201 | AAAGCACCGUCCACCCACAA | - |
| 777 | 58525 | WIZ | exon_05_c | chr19:15438577 -15440715 | chr19:15439178-15439197 | CACCGUCCACCCACAAGGGC | - |
| 778 | 58525 | WIZ | exon_05_c | chr19:15438577 -15440715 | chr19:15439177-15439196 | ACCGUCCACCCACAAGGGCU | - |
| 779 | 58525 | WIZ | exon_05_c | chr19:15438577 -15440715 | chr19:15439175-15439194 | CGUCCACCCACAAGGGCUGG | - |
| 780 | 58525 | WIZ | exon_05_c | chr19:15438577 -15440715 | chr19:15439167-15439186 | CACAAGGGCUGGGGGAACGG | - |
| 781 | 58525 | WIZ | exon_05_c | chr19:15438577 -15440715 | chr19:15439158-15439177 | UGGGGGAACGGAGGCGCCCU | - |
| 782 | 58525 | WIZ | exon_05_c | chr19:15438577 -15440715 | chr19:15439086-15439105 | AGGGGAAAAAUCCAUCUCGG | + |
| 783 | 58525 | WIZ | exon_05_c | chr19:15438577 -15440715 | chr19:15439067-15439086 | GUGAAAAGACCCCAUUUUCA | + |
| 784 | 58525 | WIZ | exon_05_c | chr19:15438577 -15440715 | chr19:15439066-15439085 | GGUGAAAAGACCCCAUUUUC | + |
| 785 | 58525 | WIZ | exon_05_c | chr19:15438577 -15440715 | chr19:15439035-15439054 | CGCCUGCGGGAUGAGGCUGG | + |
| 786 | 58525 | WIZ | exon_05_c | chr19:15438577 -15440715 | chr19:15439033-15439052 | GCCGCCUGCGGGAUGAGGCU | + |
| 787 | 58525 | WIZ | exon_05_c | chr19:15438577 -15440715 | chr19:15439032-15439051 | GGCCGCCUGCGGGAUGAGGC | + |
| 788 | 58525 | WIZ | exon_05_c | chr19:15438577 -15440715 | chr19:15439028-15439047 | CCAGGGCCGCCUGCGGGAUG | + |
| 789 | 58525 | WIZ | exon_05_c | chr19:15438577 -15440715 | chr19:15439031-15439050 | CCUCAUCCCGCAGGCGGCCC | - |
| 790 | 58525 | WIZ | exon_05_c | chr19:15438577 -15440715 | chr19:15439011-15439030 | GAAUGCCUGCUUCAGCUCCA | + |
| 791 | 58525 | WIZ | exon_05_c | chr19:15438577 -15440715 | chr19:15439007-15439026 | GCUGAAGCAGGCAUUCCGAG | - |
| 792 | 58525 | WIZ | exon_05_c | chr19:15438577 -15440715 | chr19:15438938-15438957 | GCACAAUGGGUACCAUCCCU | + |
| 793 | 58525 | WIZ | exon_05_c | chr19:15438577 -15440715 | chr19:15438925-15438944 | AGCUUCGCCACGAGCACAAU | + |
| 794 | 58525 | WIZ | exon_05_c | chr19:15438577 -15440715 | chr19:15438935-15438954 | GAUGGUACCCAUUGUGCUCG | - |
| 795 | 58525 | WIZ | exon_05_c | chr19:15438577 -15440715 | chr19:15438926-15438945 | CAUUGUGCUCGUGGCGAAGC | - |
| 796 | 58525 | WIZ | exon_05_c | chr19:15438577 -15440715 | chr19:15438925-15438944 | AUUGUGCUCGUGGCGAAGCU | - |
| 797 | 58525 | WIZ | exon_05_c | chr19:15438577 -15440715 | chr19:15438900-15438919 | CGCAGGUCAUGGCGGCAGCC | - |
| 798 | 58525 | WIZ | exon_05_c | chr19:15438577 -15440715 | chr19:15438899-15438918 | GCAGGUCAUGGCGGCAGCCA | - |
| 799 | 58525 | WIZ | exon_05_c | chr19:15438577 -15440715 | chr19:15438871-15438890 | UCCUCGGGCUGCAACCUUGG | + |
| 800 | 58525 | WIZ | exon_05_c | chr19:15438577 -15440715 | chr19:15438869-15438888 | GCUCCUCGGGCUGCAACCUU | + |
| 801 | 58525 | WIZ | exon_05_c | chr19:15438577 -15440715 | chr19:15438875-15438894 | GCCCCCAAGGUUGCAGCCCG | - |
| 802 | 58525 | WIZ | exon_05_c | chr19:15438577 -15440715 | chr19:15438868-15438887 | AGGUUGCAGCCCGAGGAGCU | - |
| 803 | 58525 | WIZ | exon_05_c | chr19:15438577 -15440715 | chr19:15438824-15438843 | CGUCCAGGAGCAGGAAGUCC | + |
| 804 | 58525 | WIZ | exon_05_c | chr19:15438577 -15440715 | chr19:15438815-15438834 | CCAGCGGCGCGUCCAGGAGC | + |
| 805 | 58525 | WIZ | exon_05_c | chr19:15438577 -15440715 | chr19:15438809-15438828 | GGCCGCCCAGCGGCGCGUCC | + |
| 806 | 58525 | WIZ | exon_05_c | chr19:15438577 -15440715 | chr19:15438818-15438837 | CCUGCUCCUGGACGCGCCGC | - |
| 807 | 58525 | WIZ | exon_05_c | chr19:15438577 -15440715 | chr19:15438817-15438836 | CUGCUCCUGGACGCGCCGCU | - |
| 808 | 58525 | WIZ | exon_05_c | chr19:15438577 -15440715 | chr19:15438814-15438833 | CUCCUGGACGCGCCGCUGGG | - |
| 809 | 58525 | WIZ | exon_05_c | chr19:15438577 -15440715 | chr19:15438806-15438825 | CGCGCCGCUGGGCGGCCCGC | - |
| 810 | 58525 | WIZ | exon_05_c | chr19:15438577 -15440715 | chr19:15438805-15438824 | GCGCCGCUGGGCGGCCCGCU | - |
| 811 | 58525 | WIZ | exon_05_c | chr19:15438577 -15440715 | chr19:15438804-15438823 | CGCCGCUGGGCGGCCCGCUG | - |
| 812 | 58525 | WIZ | exon_05_c | chr19:15438577 -15440715 | chr19:15438788-15438807 | GGAGUGUGUCCAGCCCCAGC | + |
| 813 | 58525 | WIZ | exon_05_c | chr19:15438577 -15440715 | chr19:15438784-15438803 | GGGCUGGACACACUCCUGGA | - |
| 814 | 58525 | WIZ | exon_05_c | chr19:15438577 -15440715 | chr19:15438767-15438786 | CCAUGGCCGGAUCCCCAUCC | + |
| 815 | 58525 | WIZ | exon_05_c | chr19:15438577 -15440715 | chr19:15438754-15438773 | UCGUGCUUCAGUGCCAUGGC | + |
| 816 | 58525 | WIZ | exon_05_c | chr19:15438577 -15440715 | chr19:15438719-15438738 | GGAAGCGAUCGGGGCAGUAG | + |
| 817 | 58525 | WIZ | exon_05_c | chr19:15438577 -15440715 | chr19:15438718-15438737 | UGGAAGCGAUCGGGGCAGUA | + |
| 818 | 58525 | WIZ | exon_05_c | chr19:15438577 -15440715 | chr19:15438717-15438736 | GUGGAAGCGAUCGGGGCAGU | + |
| 819 | 58525 | WIZ | exon_05_c | chr19:15438577 -15440715 | chr19:15438710-15438729 | UGCCGUUGUGGAAGCGAUCG | + |
| 820 | 58525 | WIZ | exon_05_c | chr19:15438577 -15440715 | chr19:15438709-15438728 | AUGCCGUUGUGGAAGCGAUC | + |
| 821 | 58525 | WIZ | exon_05_c | chr19:15438577 -15440715 | chr19:15438708-15438727 | GAUGCCGUUGUGGAAGCGAU | + |
| 822 | 58525 | WIZ | exon_05_c | chr19:15438577 -15440715 | chr19:15438715-15438734 | UGCCCCGAUCGCUUCCACAA | - |
| 823 | 58525 | WIZ | exon_05_c | chr19:15438577 -15440715 | chr19:15438709-15438728 | GAUCGCUUCCACAACGGCAU | - |
| 824 | 58525 | WIZ | exon_05_c | chr19:15438577 -15440715 | chr19:15438704-15438723 | CUUCCACAACGGCAUCGGCU | - |
| 825 | 58525 | WIZ | exon_05_c | chr19:15438577 -15440715 | chr19:15438678-15438697 | CAGGUGGCCCCGGACGUGGU | + |
| 826 | 58525 | WIZ | exon_05_c | chr19:15438577 -15440715 | chr19:15438690-15438709 | UCGGCUUGGCCAACCACGUC | - |
| 827 | 58525 | WIZ | exon_05_c | chr19:15438577 -15440715 | chr19:15438689-15438708 | CGGCUUGGCCAACCACGUCC | - |
| 828 | 58525 | WIZ | exon_05_c | chr19:15438577 -15440715 | chr19:15438688-15438707 | GGCUUGGCCAACCACGUCCG | - |
| 829 | 58525 | WIZ | exon_05_c | chr19:15438577 -15440715 | chr19:15438674-15438693 | GGUUCAGGUGGCCCCGGACG | + |
| 830 | 58525 | WIZ | exon_05_c | chr19:15438577 -15440715 | chr19:15438668-15438687 | CCACGCGGUUCAGGUGGCCC | + |
| 831 | 58525 | WIZ | exon_05_c | chr19:15438577 -15440715 | chr19:15438662-15438681 | UGACGCCCACGCGGUUCAGG | + |
| 832 | 58525 | WIZ | exon_05_c | chr19:15438577 -15440715 | chr19:15438659-15438678 | AGCUGACGCCCACGCGGUUC | + |
| 833 | 58525 | WIZ | exon_05_c | chr19:15438577 -15440715 | chr19:15438671-15438690 | CCGGGGCCACCUGAACCGCG | - |
| 834 | 58525 | WIZ | exon_05_c | chr19:15438577 -15440715 | chr19:15438670-15438689 | CGGGGCCACCUGAACCGCGU | - |
| 835 | 58525 | WIZ | exon_05_c | chr19:15438577 -15440715 | chr19:15438653-15438672 | CAUUGUAGCUGACGCCCACG | + |
| 836 | 58525 | WIZ | exon_05_c | chr19:15438577 -15440715 | chr19:15438626-15438645 | CCUCCUCAGCGGAGAUGAAA | + |
| 837 | 58525 | WIZ | exon_05_c | chr19:15438577 -15440715 | chr19:15438632-15438651 | GCGCCAUUUCAUCUCCGCUG | - |
| 838 | 58525 | WIZ | exon_05_c | chr19:15438577 -15440715 | chr19:15438629-15438648 | CCAUUUCAUCUCCGCUGAGG | - |
| 839 | 58525 | WIZ | exon_05_c | chr19:15438577 -15440715 | chr19:15438597-15438616 | GAAGGAGAACCUGCGCUCAA | + |
| 840 | 58525 | WIZ | exon_05_c | chr19:15438577 -15440715 | chr19:15438609-15438628 | AGGUGAAGGCCAUUGAGCGC | - |
| 841 | 58525 | WIZ | intron_05 | chr19:15437129 -15438577 | chr19:15438541-15438560 | UUAAAGGCCCAGGAGACACA | - |
| 842 | 58525 | WIZ | intron_05 | chr19:15437129 -15438577 | chr19:15438507-15438526 | AGAGAAUUUAGAUCAACGGU | + |
| 843 | 58525 | WIZ | intron_05 | chr19:15437129 -15438577 | chr19:15438506-15438525 | GAGAGAAUUUAGAUCAACGG | + |
| 844 | 58525 | WIZ | intron_05 | chr19:15437129 -15438577 | chr19:15438484-15438503 | GUCCCCCUGCUUGGCGCUAA | + |
| 845 | 58525 | WIZ | intron_05 | chr19:15437129 -15438577 | chr19:15438483-15438502 | UGUCCCCCUGCUUGGCGCUA | + |
| 846 | 58525 | WIZ | intron_05 | chr19:15437129 -15438577 | chr19:15438492-15438511 | UCUCUCCCUUAGCGCCAAGC | - |
| 847 | 58525 | WIZ | intron_05 | chr19:15437129 -15438577 | chr19:15438491-15438510 | CUCUCCCUUAGCGCCAAGCA | - |
| 848 | 58525 | WIZ | intron_05 | chr19:15437129 -15438577 | chr19:15438490-15438509 | UCUCCCUUAGCGCCAAGCAG | - |
| 849 | 58525 | WIZ | intron_05 | chr19:15437129 -15438577 | chr19:15438482-15438501 | AGCGCCAAGCAGGGGGACAC | - |
| 850 | 58525 | WIZ | intron_05 | chr19:15437129 -15438577 | chr19:15438481-15438500 | GCGCCAAGCAGGGGGACACU | - |
| 851 | 58525 | WIZ | intron_05 | chr19:15437129 -15438577 | chr19:15438480-15438499 | CGCCAAGCAGGGGGACACUG | - |
| 852 | 58525 | WIZ | intron_05 | chr19:15437129 -15438577 | chr19:15438446-15438465 | CUGUGGCUCUCAAGUCUCUC | + |
| 853 | 58525 | WIZ | intron_05 | chr19:15437129 -15438577 | chr19:15438417-15438436 | CCACACAUCCACCGACCAGG | + |
| 854 | 58525 | WIZ | intron_05 | chr19:15437129 -15438577 | chr19:15438414-15438433 | UCUCCACACAUCCACCGACC | + |
| 855 | 58525 | WIZ | intron_05 | chr19:15437129 -15438577 | chr19:15438388-15438407 | GCUGGAAUGGCCAGGGGACU | + |
| 856 | 58525 | WIZ | intron_05 | chr19:15437129 -15438577 | chr19:15438401-15438420 | GUGGAGACGCCCCAGUCCCC | - |
| 857 | 58525 | WIZ | intron_05 | chr19:15437129 -15438577 | chr19:15438382-15438401 | CCAGUGGCUGGAAUGGCCAG | + |
| 858 | 58525 | WIZ | intron_05 | chr19:15437129 -15438577 | chr19:15438380-15438399 | CUCCAGUGGCUGGAAUGGCC | + |
| 859 | 58525 | WIZ | intron_05 | chr19:15437129 -15438577 | chr19:15438382-15438401 | CUGGCCAUUCCAGCCACUGG | - |
| 860 | 58525 | WIZ | intron_05 | chr19:15437129 -15438577 | chr19:15438351-15438370 | UGGGUAGAAGAGUCAGCCUC | - |
| 861 | 58525 | WIZ | intron_05 | chr19:15437129 -15438577 | chr19:15438172-15438191 | UUCUGAAGCUGGCCAGUGUG | + |
| 862 | 58525 | WIZ | intron_05 | chr19:15437129 -15438577 | chr19:15438167-15438186 | UGGCCAGCUUCAGAACCCCC | - |
| 863 | 58525 | WIZ | intron_05 | chr19:15437129 -15438577 | chr19:15438166-15438185 | GGCCAGCUUCAGAACCCCCU | - |
| 864 | 58525 | WIZ | intron_05 | chr19:15437129 -15438577 | chr19:15438148-15438167 | AACCUUACAGGCAGCCCCAG | + |
| 865 | 58525 | WIZ | intron_05 | chr19:15437129 -15438577 | chr19:15438146-15438165 | CAAACCUUACAGGCAGCCCC | + |
| 866 | 58525 | WIZ | intron_05 | chr19:15437129 -15438577 | chr19:15438117-15438136 | GAAUCAGAGCCUUGUACUGU | + |
| 867 | 58525 | WIZ | intron_05 | chr19:15437129 -15438577 | chr19:15438116-15438135 | GGAAUCAGAGCCUUGUACUG | + |
| 868 | 58525 | WIZ | intron_05 | chr19:15437129 -15438577 | chr19:15438089-15438108 | UGUUUCCAACAGGAGCACCC | - |
| 869 | 58525 | WIZ | intron_05 | chr19:15437129 -15438577 | chr19:15438088-15438107 | GUUUCCAACAGGAGCACCCU | - |
| 870 | 58525 | WIZ | intron_05 | chr19:15437129 -15438577 | chr19:15438069-15438088 | GCCAAUGUCAGAACCACCCA | + |
| 871 | 58525 | WIZ | intron_05 | chr19:15437129 -15438577 | chr19:15438073-15438092 | ACCCUGGGUGGUUCUGACAU | - |
| 872 | 58525 | WIZ | intron_05 | chr19:15437129 -15438577 | chr19:15438053-15438072 | UGGCAGACACAAAGCCCACU | - |
| 873 | 58525 | WIZ | intron_05 | chr19:15437129 -15438577 | chr19:15438052-15438071 | GGCAGACACAAAGCCCACUU | - |
| 874 | 58525 | WIZ | intron_05 | chr19:15437129 -15438577 | chr19:15438036-15438055 | AUACUGGCACCUCCCCAAGU | + |
| 875 | 58525 | WIZ | intron_05 | chr19:15437129 -15438577 | chr19:15438035-15438054 | CAUACUGGCACCUCCCCAAG | + |
| 876 | 58525 | WIZ | intron_05 | chr19:15437129 -15438577 | chr19:15438037-15438056 | CACUUGGGGAGGUGCCAGUA | - |
| 877 | 58525 | WIZ | intron_05 | chr19:15437129 -15438577 | chr19:15437959-15437978 | GGGGGCAAGGGGUGACAACC | - |
| 878 | 58525 | WIZ | intron_05 | chr19:15437129 -15438577 | chr19:15437930-15437949 | CACUCGGUGUCGUCACUGCC | + |
| 879 | 58525 | WIZ | intron_05 | chr19:15437129 -15438577 | chr19:15437914-15437933 | GCAUCUCAGCCCUGCUCACU | + |
| 880 | 58525 | WIZ | intron_05 | chr19:15437129 -15438577 | chr19:15437927-15437946 | AGUGACGACACCGAGUGAGC | - |
| 881 | 58525 | WIZ | intron_05 | chr19:15437129 -15438577 | chr19:15437926-15437945 | GUGACGACACCGAGUGAGCA | - |
| 882 | 58525 | WIZ | intron_05 | chr19:15437129 -15438577 | chr19:15437905-15437924 | GGCUGAGAUGCGGGGAAAGC | - |
| 883 | 58525 | WIZ | intron_05 | chr19:15437129 -15438577 | chr19:15437904-15437923 | GCUGAGAUGCGGGGAAAGCU | - |
| 884 | 58525 | WIZ | intron_05 | chr19:15437129 -15438577 | chr19:15437895-15437914 | CGGGGAAAGCUGGGAGAACC | - |
| 885 | 58525 | WIZ | intron_05 | chr19:15437129 -15438577 | chr19:15437845-15437864 | GAGCCCUGCAACUGGAGUUA | + |
| 886 | 58525 | WIZ | intron_05 | chr19:15437129 -15438577 | chr19:15437851-15437870 | AGUCCCUAACUCCAGUUGCA | - |
| 887 | 58525 | WIZ | intron_05 | chr19:15437129 -15438577 | chr19:15437812-15437831 | UGGAUGUAAUGCCCUCUGCU | + |
| 888 | 58525 | WIZ | intron_05 | chr19:15437129 -15438577 | chr19:15437738-15437757 | GAGUAAAAAUAGUCACGAGA | - |
| 889 | 58525 | WIZ | intron_05 | chr19:15437129 -15438577 | chr19:15437693-15437712 | GAUGAUGGCAGGUCCACAAC | - |
| 890 | 58525 | WIZ | intron_05 | chr19:15437129 -15438577 | chr19:15437361-15437380 | UCUGCAAAAACCCUUCUCCA | + |
| 891 | 58525 | WIZ | intron_05 | chr19:15437129 -15438577 | chr19:15437332-15437351 | ACAUCUGGCAACGUCAAGGA | + |
| 892 | 58525 | WIZ | intron_05 | chr19:15437129 -15438577 | chr19:15437331-15437350 | CACAUCUGGCAACGUCAAGG | + |
| 893 | 58525 | WIZ | intron_05 | chr19:15437129 -15438577 | chr19:15437328-15437347 | UCCCACAUCUGGCAACGUCA | + |
| 894 | 58525 | WIZ | intron_05 | chr19:15437129 -15438577 | chr19:15437333-15437352 | CUCCUUGACGUUGCCAGAUG | - |
| 895 | 58525 | WIZ | intron_05 | chr19:15437129 -15438577 | chr19:15437317-15437336 | AGAUACCCCCUUCCCACAUC | + |
| 896 | 58525 | WIZ | intron_05 | chr19:15437129 -15438577 | chr19:15437328-15437347 | UGACGUUGCCAGAUGUGGGA | - |
| 897 | 58525 | WIZ | intron_05 | chr19:15437129 -15438577 | chr19:15437327-15437346 | GACGUUGCCAGAUGUGGGAA | - |
| 898 | 58525 | WIZ | intron_05 | chr19:15437129 -15438577 | chr19:15437326-15437345 | ACGUUGCCAGAUGUGGGAAG | - |
| 899 | 58525 | WIZ | intron_05 | chr19:15437129 -15438577 | chr19:15437317-15437336 | GAUGUGGGAAGGGGGUAUCU | - |
| 900 | 58525 | WIZ | intron_05 | chr19:15437129 -15438577 | chr19:15437295-15437314 | GAGGGUCAGGCUUCCUGGAA | - |
| 901 | 58525 | WIZ | intron_05 | chr19:15437129 -15438577 | chr19:15437290-15437309 | UCAGGCUUCCUGGAAUGGGG | - |
| 902 | 58525 | WIZ | intron_05 | chr19:15437129 -15438577 | chr19:15437286-15437305 | GCUUCCUGGAAUGGGGUGGG | - |
| 903 | 58525 | WIZ | intron_05 | chr19:15437129 -15438577 | chr19:15437264-15437283 | GAUGCACGAGCUGAGAGCUG | - |
| 904 | 58525 | WIZ | intron_05 | chr19:15437129 -15438577 | chr19:15437215-15437234 | ACGGGGAAGAAAGGCAGUCC | - |
| 905 | 58525 | WIZ | intron_05 | chr19:15437129 -15438577 | chr19:15437194-15437213 | CCAUAUUCAGGGCUUCACCC | + |
| 906 | 58525 | WIZ | intron_05 | chr19:15437129 -15438577 | chr19:15437197-15437216 | CCAGGGUGAAGCCCUGAAUA | - |
| 907 | 58525 | WIZ | intron_05 | chr19:15437129 -15438577 | chr19:15437196-15437215 | CAGGGUGAAGCCCUGAAUAU | - |
| 908 | 58525 | WIZ | intron_05 | chr19:15437129 -15438577 | chr19:15437182-15437201 | CCCAACCCCUCCCCAUAUUC | + |
| 909 | 58525 | WIZ | intron_05 | chr19:15437129 -15438577 | chr19:15437195-15437214 | AGGGUGAAGCCCUGAAUAUG | - |
| 910 | 58525 | WIZ | intron_05 | chr19:15437129 -15438577 | chr19:15437191-15437210 | UGAAGCCCUGAAUAUGGGGA | - |
| 911 | 58525 | WIZ | intron_05 | chr19:15437129 -15438577 | chr19:15437190-15437209 | GAAGCCCUGAAUAUGGGGAG | - |
| 912 | 58525 | WIZ | intron_05 | chr19:15437129 -15438577 | chr19:15437113-15437132 | UGGGUCAAAGUUGGCCACUG | + |
| 913 | 58525 | WIZ | exon_06_c.1 | chr19:15436933 -15437129 | chr19:15437114-15437133 | ACAGUGGCCAACUUUGACCC | - |
| 914 | 58525 | WIZ | exon_06_c.1 | chr19:15436933 -15437129 | chr19:15437079-15437098 | CGCAGAAGUCACAGCGCAUC | + |
| 915 | 58525 | WIZ | exon_06_c.1 | chr19:15436933 -15437129 | chr19:15437079-15437098 | GAUGCGCUGUGACUUCUGCG | - |
| 916 | 58525 | WIZ | exon_06_c.1 | chr19:15436933 -15437129 | chr19:15437075-15437094 | CGCUGUGACUUCUGCGGGGC | - |
| 917 | 58525 | WIZ | exon_06_c.1 | chr19:15436933 -15437129 | chr19:15437062-15437081 | GCGGGGCUGGCUUCGACACA | - |
| 918 | 58525 | WIZ | exon_06_c.1 | chr19:15436933 -15437129 | chr19:15437057-15437076 | GCUGGCUUCGACACACGGGC | - |
| 919 | 58525 | WIZ | exon_06_c.1 | chr19:15436933 -15437129 | chr19:15437035-15437054 | CCGGGCGUGGCUGGAGAGGC | + |
| 920 | 58525 | WIZ | exon_06_c.1 | chr19:15436933 -15437129 | chr19:15437038-15437057 | CCGGCCUCUCCAGCCACGCC | - |
| 921 | 58525 | WIZ | exon_06_c.1 | chr19:15436933 -15437129 | chr19:15437022-15437041 | CACGUAGGUGGGCCCGGGCG | + |
| 922 | 58525 | WIZ | exon_06_c.1 | chr19:15436933 -15437129 | chr19:15437016-15437035 | CGAAGUCACGUAGGUGGGCC | + |
| 923 | 58525 | WIZ | exon_06_c.1 | chr19:15436933 -15437129 | chr19:15437011-15437030 | GAUACCGAAGUCACGUAGGU | + |
| 924 | 58525 | WIZ | exon_06_c.1 | chr19:15436933 -15437129 | chr19:15437010-15437029 | UGAUACCGAAGUCACGUAGG | + |
| 925 | 58525 | WIZ | exon_06_c.1 | chr19:15436933 -15437129 | chr19:15437018-15437037 | CGGGCCCACCUACGUGACUU | - |
| 926 | 58525 | WIZ | exon_06_c.1 | chr19:15436933 -15437129 | chr19:15437005-15437024 | GUGACUUCGGUAUCACCAAC | - |
| 927 | 58525 | WIZ | exon_06_c.1 | chr19:15436933 -15437129 | chr19:15437004-15437023 | UGACUUCGGUAUCACCAACU | - |
| 928 | 58525 | WIZ | exon_06_c.1 | chr19:15436933 -15437129 | chr19:15436964-15436983 | AGCUCCUGCAGGAUGUUGAU | + |
| 929 | 58525 | WIZ | exon_06_c.2 | chr19:15436805 -15436933 | chr19:15436912-15436931 | AGGCUCUCGGCCCAGGGGGC | + |
| 930 | 58525 | WIZ | exon_06_c.2 | chr19:15436805 -15436933 | chr19:15436926-15436945 | UGAGCAGCCCCCCAGCCCCC | - |
| 931 | 58525 | WIZ | exon_06_c.2 | chr19:15436805 -15436933 | chr19:15436908-15436927 | CCCCAGGCUCUCGGCCCAGG | + |
| 932 | 58525 | WIZ | exon_06_c.2 | chr19:15436805 -15436933 | chr19:15436912-15436931 | GCCCCCUGGGCCGAGAGCCU | - |
| 933 | 58525 | WIZ | exon_06_c.2 | chr19:15436805 -15436933 | chr19:15436880-15436899 | CGGGAGGUCAGGAAGCUGCC | + |
| 934 | 58525 | WIZ | exon_06_c.2 | chr19:15436805 -15436933 | chr19:15436879-15436898 | GCAGCUUCCUGACCUCCCGU | - |
| 935 | 58525 | WIZ | exon_06_c.2 | chr19:15436805 -15436933 | chr19:15436864-15436883 | AGGUAAGCGGGGCCGACGGG | + |
| 936 | 58525 | WIZ | exon_06_c.2 | chr19:15436805 -15436933 | chr19:15436861-15436880 | GAGAGGUAAGCGGGGCCGAC | + |
| 937 | 58525 | WIZ | exon_06_c.2 | chr19:15436805 -15436933 | chr19:15436860-15436879 | UGAGAGGUAAGCGGGGCCGA | + |
| 938 | 58525 | WIZ | exon_06_c.2 | chr19:15436805 -15436933 | chr19:15436853-15436872 | GGCACCGUGAGAGGUAAGCG | + |
| 939 | 58525 | WIZ | exon_06_c.2 | chr19:15436805 -15436933 | chr19:15436852-15436871 | GGGCACCGUGAGAGGUAAGC | + |
| 940 | 58525 | WIZ | exon_06_c.2 | chr19:15436805 -15436933 | chr19:15436851-15436870 | AGGGCACCGUGAGAGGUAAG | + |
| 941 | 58525 | WIZ | exon_06_c.2 | chr19:15436805 -15436933 | chr19:15436860-15436879 | UCGGCCCCGCUUACCUCUCA | - |
| 942 | 58525 | WIZ | exon_06_c.2 | chr19:15436805 -15436933 | chr19:15436844-15436863 | GGUGGAAAGGGCACCGUGAG | + |
| 943 | 58525 | WIZ | exon_06_c.2 | chr19:15436805 -15436933 | chr19:15436832-15436851 | UCAGCCCAGGUGGGUGGAAA | + |
| 944 | 58525 | WIZ | exon_06_c.2 | chr19:15436805 -15436933 | chr19:15436839-15436858 | GGUGCCCUUUCCACCCACCU | - |
| 945 | 58525 | WIZ | exon_06_c.2 | chr19:15436805 -15436933 | chr19:15436825-15436844 | CCACCUGGGCUGAGGACCCU | - |
| 946 | 58525 | WIZ | exon_06_c.2 | chr19:15436805 -15436933 | chr19:15436806-15436825 | CAUCUCCAUAGGCUGGCCCA | + |
| 947 | 58525 | WIZ | exon_06_c.2 | chr19:15436805 -15436933 | chr19:15436814-15436833 | GAGGACCCUGGGCCAGCCUA | - |
| 948 | 58525 | WIZ | exon_06_c.2 | chr19:15436805 -15436933 | chr19:15436799-15436818 | CCCUUACCAUCUCCAUAGGC | + |
| 949 | 58525 | WIZ | exon_06_c.2 | chr19:15436805 -15436933 | chr19:15436803-15436822 | GCCAGCCUAUGGAGAUGGUA | - |
| 950 | 58525 | WIZ | intron_06 | chr19:15433290 -15436805 | chr19:15436802-15436821 | CCAGCCUAUGGAGAUGGUAA | - |
| 951 | 58525 | WIZ | intron_06 | chr19:15433290 -15436805 | chr19:15436736-15436755 | CCCCGCCCCUCCAAUGCUCU | + |
| 952 | 58525 | WIZ | intron_06 | chr19:15433290 -15436805 | chr19:15436745-15436764 | CAGGGGCCCAGAGCAUUGGA | - |
| 953 | 58525 | WIZ | intron_06 | chr19:15433290 -15436805 | chr19:15436735-15436754 | GAGCAUUGGAGGGGCGGGGC | - |
| 954 | 58525 | WIZ | intron_06 | chr19:15433290 -15436805 | chr19:15436636-15436655 | AGGACACCUAAAUAGCAGGG | + |
| 955 | 58525 | WIZ | intron_06 | chr19:15433290 -15436805 | chr19:15436633-15436652 | GAAAGGACACCUAAAUAGCA | + |
| 956 | 58525 | WIZ | intron_06 | chr19:15433290 -15436805 | chr19:15436611-15436630 | UUUCACUCAGGAUCUGGGCC | - |
| 957 | 58525 | WIZ | intron_06 | chr19:15433290 -15436805 | chr19:15436590-15436609 | ACUGGAUCCAGAAAGAGACC | + |
| 958 | 58525 | WIZ | intron_06 | chr19:15433290 -15436805 | chr19:15436321-15436340 | CAUUAACAGCAAAGAAUCUG | + |
| 959 | 58525 | WIZ | intron_06 | chr19:15433290 -15436805 | chr19:15436206-15436225 | UAACAGCCAUACAUGACCAA | + |
| 960 | 58525 | WIZ | intron_06 | chr19:15433290 -15436805 | chr19:15436161-15436180 | CAAUAGGAUCCCCACUAGCC | + |
| 961 | 58525 | WIZ | intron_06 | chr19:15433290 -15436805 | chr19:15436163-15436182 | CAGGCUAGUGGGGAUCCUAU | - |
| 962 | 58525 | WIZ | intron_06 | chr19:15433290 -15436805 | chr19:15435820-15435839 | UCAGAAAAAAUCUAGCCUCU | + |
| 963 | 58525 | WIZ | intron_06 | chr19:15433290 -15436805 | chr19:15435536-15435555 | UGAAAAUCUAGACUCUAGGC | + |
| 964 | 58525 | WIZ | intron_06 | chr19:15433290 -15436805 | chr19:15435512-15435531 | CUGCCGGAUAAAGCAAACAU | + |
| 965 | 58525 | WIZ | intron_06 | chr19:15433290 -15436805 | chr19:15435496-15435515 | GAGUAGCAUAUCAGGUCUGC | + |
| 966 | 58525 | WIZ | intron_06 | chr19:15433290 -15436805 | chr19:15435488-15435507 | UGAUAAUGGAGUAGCAUAUC | + |
| 967 | 58525 | WIZ | intron_06 | chr19:15433290 -15436805 | chr19:15435301-15435320 | ACGUUAAAAUCUUAGUACAG | + |
| 968 | 58525 | WIZ | intron_06 | chr19:15433290 -15436805 | chr19:15435261-15435280 | AGUUGUACAGACUUACAUUG | + |
| 969 | 58525 | WIZ | intron_06 | chr19:15433290 -15436805 | chr19:15434927-15434946 | UUAUCCUUAAAACAGGGACA | + |
| 970 | 58525 | WIZ | intron_06 | chr19:15433290 -15436805 | chr19:15434874-15434893 | AGUCUAGCUCUACAGCUGUG | + |
| 971 | 58525 | WIZ | intron_06 | chr19:15433290 -15436805 | chr19:15434841-15434860 | UUUGGUGGUGUCUCUAGUGG | - |
| 972 | 58525 | WIZ | intron_06 | chr19:15433290 -15436805 | chr19:15434811-15434830 | GGAAAUCCAUAAGUCCUAUU | - |
| 973 | 58525 | WIZ | intron_06 | chr19:15433290 -15436805 | chr19:15434797-15434816 | CCUAUUUGGUGAAGGAGCCC | - |
| 974 | 58525 | WIZ | intron_06 | chr19:15433290 -15436805 | chr19:15434792-15434811 | UUGGUGAAGGAGCCCAGGAC | - |
| 975 | 58525 | WIZ | intron_06 | chr19:15433290 -15436805 | chr19:15434791-15434810 | UGGUGAAGGAGCCCAGGACU | - |
| 976 | 58525 | WIZ | intron_06 | chr19:15433290 -15436805 | chr19:15434742-15434761 | GGGCCCAGUCUUGCACAGCC | - |
| 977 | 58525 | WIZ | intron_06 | chr19:15433290 -15436805 | chr19:15434721-15434740 | GUAAAGGCUCGUGCAAAGCC | + |
| 978 | 58525 | WIZ | intron_06 | chr19:15433290 -15436805 | chr19:15434720-15434739 | GCUUUGCACGAGCCUUUACA | - |
| 979 | 58525 | WIZ | intron_06 | chr19:15433290 -15436805 | chr19:15434661-15434680 | GGAAUGGAGAGUGUCUGAAC | - |
| 980 | 58525 | WIZ | intron_06 | chr19:15433290 -15436805 | chr19:15434645-15434664 | GAACAGGGGGUAUCGCCCCU | - |
| 981 | 58525 | WIZ | intron_06 | chr19:15433290 -15436805 | chr19:15434637-15434656 | GGUAUCGCCCCUGGGACUGC | - |
| 982 | 58525 | WIZ | intron_06 | chr19:15433290 -15436805 | chr19:15434634-15434653 | AUCGCCCCUGGGACUGCUGG | - |
| 983 | 58525 | WIZ | intron_06 | chr19:15433290 -15436805 | chr19:15433957-15433976 | GGAAUAGUACCGAAGGGGCC | + |
| 984 | 58525 | WIZ | intron_06 | chr19:15433290 -15436805 | chr19:15433956-15433975 | AGGAAUAGUACCGAAGGGGC | + |
| 985 | 58525 | WIZ | intron_06 | chr19:15433290 -15436805 | chr19:15433950-15433969 | GCAAGUAGGAAUAGUACCGA | + |
| 986 | 58525 | WIZ | intron_06 | chr19:15433290 -15436805 | chr19:15433943-15433962 | UAUUCCUACUUGCAGCUGCU | - |
| 987 | 58525 | WIZ | intron_06 | chr19:15433290 -15436805 | chr19:15433915-15433934 | CCCAGAGUACAGAUCUAGGU | + |
| 988 | 58525 | WIZ | intron_06 | chr19:15433290 -15436805 | chr19:15433919-15433938 | UCCUACCUAGAUCUGUACUC | - |
| 989 | 58525 | WIZ | intron_06 | chr19:15433290 -15436805 | chr19:15433918-15433937 | CCUACCUAGAUCUGUACUCU | - |
| 990 | 58525 | WIZ | intron_06 | chr19:15433290 -15436805 | chr19:15433882-15433901 | CUUCAAGUGGGCUUGUGAGU | + |
| 991 | 58525 | WIZ | intron_06 | chr19:15433290 -15436805 | chr19:15433881-15433900 | CCUUCAAGUGGGCUUGUGAG | + |
| 992 | 58525 | WIZ | intron_06 | chr19:15433290 -15436805 | chr19:15433884-15433903 | CCACUCACAAGCCCACUUGA | - |
| 993 | 58525 | WIZ | intron_06 | chr19:15433290 -15436805 | chr19:15433870-15433889 | CUCAUGAAUGCCCUUCAAGU | + |
| 994 | 58525 | WIZ | intron_06 | chr19:15433290 -15436805 | chr19:15433883-15433902 | CACUCACAAGCCCACUUGAA | - |
| 995 | 58525 | WIZ | intron_06 | chr19:15433290 -15436805 | chr19:15433869-15433888 | GCUCAUGAAUGCCCUUCAAG | + |
| 996 | 58525 | WIZ | intron_06 | chr19:15433290 -15436805 | chr19:15433863-15433882 | GGGCAUUCAUGAGCCUGCAA | - |
| 997 | 58525 | WIZ | intron_06 | chr19:15433290 -15436805 | chr19:15433858-15433877 | UUCAUGAGCCUGCAAAGGGG | - |
| 998 | 58525 | WIZ | intron_06 | chr19:15433290 -15436805 | chr19:15433739-15433758 | UAGCAGAAGCAAGAAGCCUG | + |
| 999 | 58525 | WIZ | intron_06 | chr19:15433290 -15436805 | chr19:15433705-15433724 | ACGUGGGUGAGCUGAGUGCC | + |
| 1000 | 58525 | WIZ | intron_06 | chr19:15433290 -15436805 | chr19:15433704-15433723 | GCACUCAGCUCACCCACGUC | - |
| 1001 | 58525 | WIZ | intron_06 | chr19:15433290 -15436805 | chr19:15433689-15433708 | AGACACUACAAGCCAGACGU | + |
| 1002 | 58525 | WIZ | intron_06 | chr19:15433290 -15436805 | chr19:15433688-15433707 | CGUCUGGCUUGUAGUGUCUC | - |
| 1003 | 58525 | WIZ | intron_06 | chr19:15433290 -15436805 | chr19:15433610-15433629 | GGGUAUAAGGAAUCAGCCUA | - |
| 1004 | 58525 | WIZ | intron_06 | chr19:15433290 -15436805 | chr19:15433591-15433610 | ACCUGGCUCCUCUCAUCCGU | + |
| 1005 | 58525 | WIZ | intron_06 | chr19:15433290 -15436805 | chr19:15433602-15433621 | GGAAUCAGCCUACGGAUGAG | - |
| 1006 | 58525 | WIZ | intron_06 | chr19:15433290 -15436805 | chr19:15433595-15433614 | GCCUACGGAUGAGAGGAGCC | - |
| 1007 | 58525 | WIZ | intron_06 | chr19:15433290 -15436805 | chr19:15433558-15433577 | UCCCUCCCAAGGACAAGGCC | + |
| 1008 | 58525 | WIZ | intron_06 | chr19:15433290 -15436805 | chr19:15433526-15433545 | GCAGUUAUUCACUGAAAGAC | + |
| 1009 | 58525 | WIZ | intron_06 | chr19:15433290 -15436805 | chr19:15433525-15433544 | UCUUUCAGUGAAUAACUGCG | - |
| 1010 | 58525 | WIZ | intron_06 | chr19:15433290 -15436805 | chr19:15433518-15433537 | GUGAAUAACUGCGAGGCAGA | - |
| 1011 | 58525 | WIZ | intron_06 | chr19:15433290 -15436805 | chr19:15433514-15433533 | AUAACUGCGAGGCAGAGGGU | - |
| 1012 | 58525 | WIZ | intron_06 | chr19:15433290 -15436805 | chr19:15433496-15433515 | GUUGGCGGUUAGGGAGUGAU | - |
| 1013 | 58525 | WIZ | intron_06 | chr19:15433290 -15436805 | chr19:15433495-15433514 | UUGGCGGUUAGGGAGUGAUU | - |
| 1014 | 58525 | WIZ | intron_06 | chr19:15433290 -15436805 | chr19:15433449-15433468 | AGUAAGGAUAUGCAACAUUA | - |
| 1015 | 58525 | WIZ | intron_06 | chr19:15433290 -15436805 | chr19:15433444-15433463 | GGAUAUGCAACAUUAGGGCU | - |
| 1016 | 58525 | WIZ | intron_06 | chr19:15433290 -15436805 | chr19:15433438-15433457 | GCAACAUUAGGGCUAGGUCU | - |
| 1017 | 58525 | WIZ | intron_06 | chr19:15433290 -15436805 | chr19:15433432-15433451 | UUAGGGCUAGGUCUGGGCAC | - |
| 1018 | 58525 | WIZ | intron_06 | chr19:15433290 -15436805 | chr19:15433379-15433398 | CCUGCCCACUUAGGGAGAGG | + |
| 1019 | 58525 | WIZ | intron_06 | chr19:15433290 -15436805 | chr19:15433371-15433390 | CGCCCCCUCCUGCCCACUUA | + |
| 1020 | 58525 | WIZ | intron_06 | chr19:15433290 -15436805 | chr19:15433377-15433396 | UCUCCCUAAGUGGGCAGGAG | - |
| 1021 | 58525 | WIZ | intron_06 | chr19:15433290 -15436805 | chr19:15433344-15433363 | ACAUUGCCCCGCCCCCAACC | + |
| 1022 | 58525 | WIZ | intron_06 | chr19:15433290 -15436805 | chr19:15433304-15433323 | CCCAGCUGUUCCUUGACAGU | + |
| 1023 | 58525 | WIZ | intron_06 | chr19:15433290 -15436805 | chr19:15433317-15433336 | CUAGCCCCACCCAACUGUCA | - |
| 1024 | 58525 | WIZ | intron_06 | chr19:15433290 -15436805 | chr19:15433308-15433327 | CCCAACUGUCAAGGAACAGC | - |
| 1025 | 58525 | WIZ | exon_07_nc | chr19:15433164 -15433290 | chr19:15433262-15433281 | CGGUGAUUGAAAUGUGUUGC | - |
| 1026 | 58525 | WIZ | exon_07_nc | chr19:15433164 -15433290 | chr19:15433240-15433259 | CCUAGGGAACCCCACAAGGC | + |
| 1027 | 58525 | WIZ | exon_07_nc | chr19:15433164 -15433290 | chr19:15433254-15433273 | GAAAUGUGUUGCCGGCCUUG | - |
| 1028 | 58525 | WIZ | exon_07_nc | chr19:15433164 -15433290 | chr19:15433253-15433272 | AAAUGUGUUGCCGGCCUUGU | - |
| 1029 | 58525 | WIZ | exon_07_nc | chr19:15433164 -15433290 | chr19:15433243-15433262 | CCGGCCUUGUGGGGUUCCCU | - |
| 1030 | 58525 | WIZ | exon_07_nc | chr19:15433164 -15433290 | chr19:15433224-15433243 | GGUGCCGUUCCGCAGACCUA | + |
| 1031 | 58525 | WIZ | exon_07_nc | chr19:15433164 -15433290 | chr19:15433223-15433242 | CGGUGCCGUUCCGCAGACCU | + |
| 1032 | 58525 | WIZ | exon_07_nc | chr19:15433164 -15433290 | chr19:15433222-15433241 | GGUCUGCGGAACGGCACCGU | - |
| 1033 | 58525 | WIZ | exon_07_nc | chr19:15433164 -15433290 | chr19:15433221-15433240 | GUCUGCGGAACGGCACCGUC | - |
| 1034 | 58525 | WIZ | exon_07_nc | chr19:15433164 -15433290 | chr19:15433220-15433239 | UCUGCGGAACGGCACCGUCG | - |
| 1035 | 58525 | WIZ | exon_07_nc | chr19:15433164 -15433290 | chr19:15433219-15433238 | CUGCGGAACGGCACCGUCGG | - |
| 1036 | 58525 | WIZ | exon_07_nc | chr19:15433164 -15433290 | chr19:15433203-15433222 | GUUAUCCAACCGUCCCCCGA | + |
| 1037 | 58525 | WIZ | exon_07_nc | chr19:15433164 -15433290 | chr19:15433215-15433234 | GGAACGGCACCGUCGGGGGA | - |
| 1038 | 58525 | WIZ | exon_07_nc | chr19:15433164 -15433290 | chr19:15433211-15433230 | CGGCACCGUCGGGGGACGGU | - |
| 1039 | 58525 | WIZ | exon_07_nc | chr19:15433164 -15433290 | chr19:15433203-15433222 | UCGGGGGACGGUUGGAUAAC | - |
| 1040 | 58525 | WIZ | exon_07_nc | chr19:15433164 -15433290 | chr19:15433193-15433212 | GUUGGAUAACAGGAUGAUAC | - |
| 1041 | 58525 | WIZ | exon_07_nc | chr19:15433164 -15433290 | chr19:15433179-15433198 | UGAUACUGGAGGGAUUCUUG | - |
| 1042 | 58525 | WIZ | exon_07_nc | chr19:15433164 -15433290 | chr19:15433175-15433194 | ACUGGAGGGAUUCUUGUGGU | - |
| 1043 | 58525 | WIZ | exon_07_nc | chr19:15433164 -15433290 | chr19:15433167-15433186 | GAUUCUUGUGGUUGGAGAUC | - |
| 1044 | 58525 | WIZ | intron_07 | chr19:15432761 -15433164 | chr19:15433156-15433175 | UUGGAGAUCAGGUGUUUUCC | - |
| 1045 | 58525 | WIZ | intron_07 | chr19:15432761 -15433164 | chr19:15433135-15433154 | CAUCUCCGAGUCGGGGAUCC | + |
| 1046 | 58525 | WIZ | intron_07 | chr19:15432761 -15433164 | chr19:15433143-15433162 | GUUUUCCAGGAUCCCCGACU | - |
| 1047 | 58525 | WIZ | intron_07 | chr19:15432761 -15433164 | chr19:15433128-15433147 | AAGUCUCCAUCUCCGAGUCG | + |
| 1048 | 58525 | WIZ | intron_07 | chr19:15432761 -15433164 | chr19:15433127-15433146 | AAAGUCUCCAUCUCCGAGUC | + |
| 1049 | 58525 | WIZ | intron_07 | chr19:15432761 -15433164 | chr19:15433126-15433145 | GAAAGUCUCCAUCUCCGAGU | + |
| 1050 | 58525 | WIZ | intron_07 | chr19:15432761 -15433164 | chr19:15433137-15433156 | CAGGAUCCCCGACUCGGAGA | - |
| 1051 | 58525 | WIZ | intron_07 | chr19:15432761 -15433164 | chr19:15433121-15433140 | GAGAUGGAGACUUUCCGGAA | - |
| 1052 | 58525 | WIZ | intron_07 | chr19:15432761 -15433164 | chr19:15433120-15433139 | AGAUGGAGACUUUCCGGAAA | - |
| 1053 | 58525 | WIZ | intron_07 | chr19:15432761 -15433164 | chr19:15433115-15433134 | GAGACUUUCCGGAAAGGGAA | - |
| 1054 | 58525 | WIZ | intron_07 | chr19:15432761 -15433164 | chr19:15433114-15433133 | AGACUUUCCGGAAAGGGAAU | - |
| 1055 | 58525 | WIZ | intron_07 | chr19:15432761 -15433164 | chr19:15433113-15433132 | GACUUUCCGGAAAGGGAAUG | - |
| 1056 | 58525 | WIZ | intron_07 | chr19:15432761 -15433164 | chr19:15433109-15433128 | UUCCGGAAAGGGAAUGGGGC | - |
| 1057 | 58525 | WIZ | intron_07 | chr19:15432761 -15433164 | chr19:15433081-15433100 | GCGGAGCUAGGACCUGCCCU | + |
| 1058 | 58525 | WIZ | intron_07 | chr19:15432761 -15433164 | chr19:15433069-15433088 | GAGCCCCGACGGGCGGAGCU | + |
| 1059 | 58525 | WIZ | intron_07 | chr19:15432761 -15433164 | chr19:15433077-15433096 | CAGGUCCUAGCUCCGCCCGU | - |
| 1060 | 58525 | WIZ | intron_07 | chr19:15432761 -15433164 | chr19:15433076-15433095 | AGGUCCUAGCUCCGCCCGUC | - |
| 1061 | 58525 | WIZ | intron_07 | chr19:15432761 -15433164 | chr19:15433062-15433081 | CUCUUAAGAGCCCCGACGGG | + |
| 1062 | 58525 | WIZ | intron_07 | chr19:15432761 -15433164 | chr19:15433075-15433094 | GGUCCUAGCUCCGCCCGUCG | - |
| 1063 | 58525 | WIZ | intron_07 | chr19:15432761 -15433164 | chr19:15433059-15433078 | AAACUCUUAAGAGCCCCGAC | + |
| 1064 | 58525 | WIZ | intron_07 | chr19:15432761 -15433164 | chr19:15433045-15433064 | GAGUUUUGACGUUGUUUAAG | - |
| 1065 | 58525 | WIZ | intron_07 | chr19:15432761 -15433164 | chr19:15433007-15433026 | UCCCUAGGAUGGGAAUCUUC | + |
| 1066 | 58525 | WIZ | intron_07 | chr19:15432761 -15433164 | chr19:15433012-15433031 | GGCCGGAAGAUUCCCAUCCU | - |
| 1067 | 58525 | WIZ | intron_07 | chr19:15432761 -15433164 | chr19:15432997-15433016 | GACAUCUCUAUCCCUAGGAU | + |
| 1068 | 58525 | WIZ | intron_07 | chr19:15432761 -15433164 | chr19:15433011-15433030 | GCCGGAAGAUUCCCAUCCUA | - |
| 1069 | 58525 | WIZ | intron_07 | chr19:15432761 -15433164 | chr19:15432997-15433016 | AUCCUAGGGAUAGAGAUGUC | - |
| 1070 | 58525 | WIZ | intron_07 | chr19:15432761 -15433164 | chr19:15432996-15433015 | UCCUAGGGAUAGAGAUGUCC | - |
| 1071 | 58525 | WIZ | intron_07 | chr19:15432761 -15433164 | chr19:15432995-15433014 | CCUAGGGAUAGAGAUGUCCG | - |
| 1072 | 58525 | WIZ | intron_07 | chr19:15432761 -15433164 | chr19:15432990-15433009 | GGAUAGAGAUGUCCGGGGAC | - |
| 1073 | 58525 | WIZ | intron_07 | chr19:15432761 -15433164 | chr19:15432989-15433008 | GAUAGAGAUGUCCGGGGACU | - |
| 1074 | 58525 | WIZ | intron_07 | chr19:15432761 -15433164 | chr19:15432984-15433003 | AGAUGUCCGGGGACUGGGCU | - |
| 1075 | 58525 | WIZ | intron_07 | chr19:15432761 -15433164 | chr19:15432983-15433002 | GAUGUCCGGGGACUGGGCUG | - |
| 1076 | 58525 | WIZ | intron_07 | chr19:15432761 -15433164 | chr19:15432934-15432953 | CUAGCGGAUGCACCCACGCU | + |
| 1077 | 58525 | WIZ | intron_07 | chr19:15432761 -15433164 | chr19:15432933-15432952 | GCUAGCGGAUGCACCCACGC | + |
| 1078 | 58525 | WIZ | intron_07 | chr19:15432761 -15433164 | chr19:15432932-15432951 | CGUGGGUGCAUCCGCUAGCC | - |
| 1079 | 58525 | WIZ | intron_07 | chr19:15432761 -15433164 | chr19:15432918-15432937 | UUGUCGCGCGCCCUGGCUAG | + |
| 1080 | 58525 | WIZ | intron_07 | chr19:15432761 -15433164 | chr19:15432931-15432950 | GUGGGUGCAUCCGCUAGCCA | - |
| 1081 | 58525 | WIZ | intron_07 | chr19:15432761 -15433164 | chr19:15432911-15432930 | UGGAAGCUUGUCGCGCGCCC | + |
| 1082 | 58525 | WIZ | intron_07 | chr19:15432761 -15433164 | chr19:15432889-15432908 | AGCUGCAGCCGUCCGCCCUC | - |
| 1083 | 58525 | WIZ | intron_07 | chr19:15432761 -15433164 | chr19:15432888-15432907 | GCUGCAGCCGUCCGCCCUCA | - |
| 1084 | 58525 | WIZ | intron_07 | chr19:15432761 -15433164 | chr19:15432871-15432890 | ACCGUUCGUCUGGGCCCUGA | + |
| 1085 | 58525 | WIZ | intron_07 | chr19:15432761 -15433164 | chr19:15432870-15432889 | AACCGUUCGUCUGGGCCCUG | + |
| 1086 | 58525 | WIZ | intron_07 | chr19:15432761 -15433164 | chr19:15432862-15432881 | ACGAGCGAAACCGUUCGUCU | + |
| 1087 | 58525 | WIZ | intron_07 | chr19:15432761 -15433164 | chr19:15432861-15432880 | CACGAGCGAAACCGUUCGUC | + |
| 1088 | 58525 | WIZ | intron_07 | chr19:15432761 -15433164 | chr19:15432875-15432894 | GCCCUCAGGGCCCAGACGAA | - |
| 1089 | 58525 | WIZ | intron_07 | chr19:15432761 -15433164 | chr19:15432863-15432882 | CAGACGAACGGUUUCGCUCG | - |
| 1090 | 58525 | WIZ | intron_07 | chr19:15432761 -15433164 | chr19:15432856-15432875 | ACGGUUUCGCUCGUGGCACU | - |
| 1091 | 58525 | WIZ | intron_07 | chr19:15432761 -15433164 | chr19:15432849-15432868 | CGCUCGUGGCACUCGGCGCU | - |
| 1092 | 58525 | WIZ | intron_07 | chr19:15432761 -15433164 | chr19:15432822-15432841 | CGGCACUCGGCAGGCCAACC | - |
| 1093 | 58525 | WIZ | intron_07 | chr19:15432761 -15433164 | chr19:15432805-15432824 | CCCUCAGGGCGCGCCCAGGU | + |
| 1094 | 58525 | WIZ | intron_07 | chr19:15432761 -15433164 | chr19:15432809-15432828 | GCCAACCUGGGCGCGCCCUG | - |
| 1095 | 58525 | WIZ | intron_07 | chr19:15432761 -15433164 | chr19:15432808-15432827 | CCAACCUGGGCGCGCCCUGA | - |
| 1096 | 58525 | WIZ | intron_07 | chr19:15432761 -15433164 | chr19:15432807-15432826 | CAACCUGGGCGCGCCCUGAG | - |
| 1097 | 58525 | WIZ | exon_08_nc.1 | chr19:15432556 -15432761 | chr19:15432736-15432755 | CGCUCAGCUGCUCCCGCCUG | - |
| 1098 | 58525 | WIZ | exon_08_nc.1 | chr19:15432556 -15432761 | chr19:15432707-15432726 | UGGCUCCGGCGCACGCGGGG | + |
| 1099 | 58525 | WIZ | exon_08_nc.1 | chr19:15432556 -15432761 | chr19:15432704-15432723 | UCUUGGCUCCGGCGCACGCG | + |
| 1100 | 58525 | WIZ | exon_08_nc.1 | chr19:15432556 -15432761 | chr19:15432703-15432722 | AUCUUGGCUCCGGCGCACGC | + |
| 1101 | 58525 | WIZ | exon_08_nc.1 | chr19:15432556 -15432761 | chr19:15432702-15432721 | CAUCUUGGCUCCGGCGCACG | + |
| 1102 | 58525 | WIZ | exon_08_nc.1 | chr19:15432556 -15432761 | chr19:15432704-15432723 | CGCGUGCGCCGGAGCCAAGA | - |
| 1103 | 58525 | WIZ | exon_08_nc.1 | chr19:15432556 -15432761 | chr19:15432672-15432691 | UGUCACUCGGCACUGGGCGG | + |
| 1104 | 58525 | WIZ | exon_08_nc.1 | chr19:15432556 -15432761 | chr19:15432669-15432688 | UUUUGUCACUCGGCACUGGG | + |
| 1105 | 58525 | WIZ | exon_08_nc.1 | chr19:15432556 -15432761 | chr19:15432665-15432684 | CCGCUUUUGUCACUCGGCAC | + |
| 1106 | 58525 | WIZ | exon_08_nc.1 | chr19:15432556 -15432761 | chr19:15432659-15432678 | UGCUCUCCGCUUUUGUCACU | + |
| 1107 | 58525 | WIZ | exon_08_nc.2 | chr19:15432433 -15432556 | chr19:15432475-15432494 | UCGGCCUUGGGCCCGUCCCG | + |
| 1108 | 58525 | WIZ | exon_08_nc.2 | chr19:15432433 -15432556 | chr19:15432426-15432445 | GCUCUUACCGGGCGCGGGAG | + |
| 1109 | 58525 | WIZ | intron_08 | chr19:15431182 -15432433 | chr19:15432415-15432434 | CCCAAGCGCGGGCUCUUACC | + |
| 1110 | 58525 | WIZ | intron_08 | chr19:15431182 -15432433 | chr19:15432414-15432433 | UCCCAAGCGCGGGCUCUUAC | + |
| 1111 | 58525 | WIZ | intron_08 | chr19:15431182 -15432433 | chr19:15432419-15432438 | GCCCGGUAAGAGCCCGCGCU | - |
| 1112 | 58525 | WIZ | intron_08 | chr19:15431182 -15432433 | chr19:15432418-15432437 | CCCGGUAAGAGCCCGCGCUU | - |
| 1113 | 58525 | WIZ | intron_08 | chr19:15431182 -15432433 | chr19:15432403-15432422 | UCCCCACACCCUCCCAAGCG | + |
| 1114 | 58525 | WIZ | intron_08 | chr19:15431182 -15432433 | chr19:15432415-15432434 | GGUAAGAGCCCGCGCUUGGG | - |
| 1115 | 58525 | WIZ | intron_08 | chr19:15431182 -15432433 | chr19:15432414-15432433 | GUAAGAGCCCGCGCUUGGGA | - |
| 1116 | 58525 | WIZ | intron_08 | chr19:15431182 -15432433 | chr19:15432409-15432428 | AGCCCGCGCUUGGGAGGGUG | - |
| 1117 | 58525 | WIZ | intron_08 | chr19:15431182 -15432433 | chr19:15432408-15432427 | GCCCGCGCUUGGGAGGGUGU | - |
| 1118 | 58525 | WIZ | intron_08 | chr19:15431182 -15432433 | chr19:15432379-15432398 | AAGGUCGGAAUCCCGCCUGC | - |
| 1119 | 58525 | WIZ | intron_08 | chr19:15431182 -15432433 | chr19:15432351-15432370 | ACGGAAGGCGUCGGGGGCGG | + |
| 1120 | 58525 | WIZ | intron_08 | chr19:15431182 -15432433 | chr19:15432348-15432367 | UGGACGGAAGGCGUCGGGGG | + |
| 1121 | 58525 | WIZ | intron_08 | chr19:15431182 -15432433 | chr19:15432345-15432364 | GACUGGACGGAAGGCGUCGG | + |
| 1122 | 58525 | WIZ | intron_08 | chr19:15431182 -15432433 | chr19:15432344-15432363 | AGACUGGACGGAAGGCGUCG | + |
| 1123 | 58525 | WIZ | intron_08 | chr19:15431182 -15432433 | chr19:15432343-15432362 | CAGACUGGACGGAAGGCGUC | + |
| 1124 | 58525 | WIZ | intron_08 | chr19:15431182 -15432433 | chr19:15432336-15432355 | GGUCCCGCAGACUGGACGGA | + |
| 1125 | 58525 | WIZ | intron_08 | chr19:15431182 -15432433 | chr19:15432343-15432362 | GACGCCUUCCGUCCAGUCUG | - |
| 1126 | 58525 | WIZ | intron_08 | chr19:15431182 -15432433 | chr19:15432342-15432361 | ACGCCUUCCGUCCAGUCUGC | - |
| 1127 | 58525 | WIZ | intron_08 | chr19:15431182 -15432433 | chr19:15432311-15432330 | AACUAAAGGGCCUGGGGGAG | + |
| 1128 | 58525 | WIZ | intron_08 | chr19:15431182 -15432433 | chr19:15432306-15432325 | CACACAACUAAAGGGCCUGG | + |
| 1129 | 58525 | WIZ | intron_08 | chr19:15431182 -15432433 | chr19:15432305-15432324 | CCACACAACUAAAGGGCCUG | + |
| 1130 | 58525 | WIZ | intron_08 | chr19:15431182 -15432433 | chr19:15432298-15432317 | CCUGGGCCCACACAACUAAA | + |
| 1131 | 58525 | WIZ | intron_08 | chr19:15431182 -15432433 | chr19:15432301-15432320 | CCCUUUAGUUGUGUGGGCCC | - |
| 1132 | 58525 | WIZ | intron_08 | chr19:15431182 -15432433 | chr19:15432281-15432300 | GAGCGGCGACAGAAGGCCCU | + |
| 1133 | 58525 | WIZ | intron_08 | chr19:15431182 -15432433 | chr19:15432280-15432299 | CGAGCGGCGACAGAAGGCCC | + |
| 1134 | 58525 | WIZ | intron_08 | chr19:15431182 -15432433 | chr19:15432279-15432298 | GGCCUUCUGUCGCCGCUCGC | - |
| 1135 | 58525 | WIZ | intron_08 | chr19:15431182 -15432433 | chr19:15432264-15432283 | GAGGCCUGGGACCCUGCGAG | + |
| 1136 | 58525 | WIZ | intron_08 | chr19:15431182 -15432433 | chr19:15432271-15432290 | GUCGCCGCUCGCAGGGUCCC | - |
| 1137 | 58525 | WIZ | intron_08 | chr19:15431182 -15432433 | chr19:15432232-15432251 | AAGGUCUCGAGGAGCGGCGG | + |
| 1138 | 58525 | WIZ | intron_08 | chr19:15431182 -15432433 | chr19:15432229-15432248 | GCAAAGGUCUCGAGGAGCGG | + |
| 1139 | 58525 | WIZ | intron_08 | chr19:15431182 -15432433 | chr19:15432226-15432245 | GGGGCAAAGGUCUCGAGGAG | + |
| 1140 | 58525 | WIZ | intron_08 | chr19:15431182 -15432433 | chr19:15432221-15432240 | CAGACGGGGCAAAGGUCUCG | + |
| 1141 | 58525 | WIZ | intron_08 | chr19:15431182 -15432433 | chr19:15432213-15432232 | ACAUCUGUCAGACGGGGCAA | + |
| 1142 | 58525 | WIZ | intron_08 | chr19:15431182 -15432433 | chr19:15432207-15432226 | CAAGGGACAUCUGUCAGACG | + |
| 1143 | 58525 | WIZ | intron_08 | chr19:15431182 -15432433 | chr19:15432206-15432225 | GCAAGGGACAUCUGUCAGAC | + |
| 1144 | 58525 | WIZ | intron_08 | chr19:15431182 -15432433 | chr19:15432205-15432224 | GGCAAGGGACAUCUGUCAGA | + |
| 1145 | 58525 | WIZ | intron_08 | chr19:15431182 -15432433 | chr19:15432189-15432208 | CCGGGGCUCCAAAGGGGGCA | + |
| 1146 | 58525 | WIZ | intron_08 | chr19:15431182 -15432433 | chr19:15432200-15432219 | CAGAUGUCCCUUGCCCCCUU | - |
| 1147 | 58525 | WIZ | intron_08 | chr19:15431182 -15432433 | chr19:15432183-15432202 | ACGCUCCCGGGGCUCCAAAG | + |
| 1148 | 58525 | WIZ | intron_08 | chr19:15431182 -15432433 | chr19:15432182-15432201 | GACGCUCCCGGGGCUCCAAA | + |
| 1149 | 58525 | WIZ | intron_08 | chr19:15431182 -15432433 | chr19:15432172-15432191 | CGUGGCAAGGGACGCUCCCG | + |
| 1150 | 58525 | WIZ | intron_08 | chr19:15431182 -15432433 | chr19:15432171-15432190 | CCGUGGCAAGGGACGCUCCC | + |
| 1151 | 58525 | WIZ | intron_08 | chr19:15431182 -15432433 | chr19:15432170-15432189 | ACCGUGGCAAGGGACGCUCC | + |
| 1152 | 58525 | WIZ | intron_08 | chr19:15431182 -15432433 | chr19:15432160-15432179 | ACGGACCGGAACCGUGGCAA | + |
| 1153 | 58525 | WIZ | intron_08 | chr19:15431182 -15432433 | chr19:15432174-15432193 | CCCGGGAGCGUCCCUUGCCA | - |
| 1154 | 58525 | WIZ | intron_08 | chr19:15431182 -15432433 | chr19:15432159-15432178 | GACGGACCGGAACCGUGGCA | + |
| 1155 | 58525 | WIZ | intron_08 | chr19:15431182 -15432433 | chr19:15432154-15432173 | CACCGGACGGACCGGAACCG | + |
| 1156 | 58525 | WIZ | intron_08 | chr19:15431182 -15432433 | chr19:15432146-15432165 | AGUUUCCGCACCGGACGGAC | + |
| 1157 | 58525 | WIZ | intron_08 | chr19:15431182 -15432433 | chr19:15432159-15432178 | UGCCACGGUUCCGGUCCGUC | - |
| 1158 | 58525 | WIZ | intron_08 | chr19:15431182 -15432433 | chr19:15432141-15432160 | AAGUGAGUUUCCGCACCGGA | + |
| 1159 | 58525 | WIZ | intron_08 | chr19:15431182 -15432433 | chr19:15432154-15432173 | CGGUUCCGGUCCGUCCGGUG | - |
| 1160 | 58525 | WIZ | intron_08 | chr19:15431182 -15432433 | chr19:15432137-15432156 | GCUGAAGUGAGUUUCCGCAC | + |
| 1161 | 58525 | WIZ | intron_08 | chr19:15431182 -15432433 | chr19:15432115-15432134 | CGCGUCUGUCAGAUGGGGCA | + |
| 1162 | 58525 | WIZ | intron_08 | chr19:15431182 -15432433 | chr19:15432114-15432133 | GCGCGUCUGUCAGAUGGGGC | + |
| 1163 | 58525 | WIZ | intron_08 | chr19:15431182 -15432433 | chr19:15432110-15432129 | GUGGGCGCGUCUGUCAGAUG | + |
| 1164 | 58525 | WIZ | intron_08 | chr19:15431182 -15432433 | chr19:15432109-15432128 | GGUGGGCGCGUCUGUCAGAU | + |
| 1165 | 58525 | WIZ | intron_08 | chr19:15431182 -15432433 | chr19:15432108-15432127 | GGGUGGGCGCGUCUGUCAGA | + |
| 1166 | 58525 | WIZ | intron_08 | chr19:15431182 -15432433 | chr19:15432092-15432111 | UCAAAGUCUCCGGGUCGGGU | + |
| 1167 | 58525 | WIZ | intron_08 | chr19:15431182 -15432433 | chr19:15432091-15432110 | GUCAAAGUCUCCGGGUCGGG | + |
| 1168 | 58525 | WIZ | intron_08 | chr19:15431182 -15432433 | chr19:15432104-15432123 | ACAGACGCGCCCACCCGACC | - |
| 1169 | 58525 | WIZ | intron_08 | chr19:15431182 -15432433 | chr19:15432088-15432107 | UUUGUCAAAGUCUCCGGGUC | + |
| 1170 | 58525 | WIZ | intron_08 | chr19:15431182 -15432433 | chr19:15432087-15432106 | CUUUGUCAAAGUCUCCGGGU | + |
| 1171 | 58525 | WIZ | intron_08 | chr19:15431182 -15432433 | chr19:15432063-15432082 | CGCUGAGGACUGGGGCACCG | + |
| 1172 | 58525 | WIZ | intron_08 | chr19:15431182 -15432433 | chr19:15432055-15432074 | AGAGUAGGCGCUGAGGACUG | + |
| 1173 | 58525 | WIZ | intron_08 | chr19:15431182 -15432433 | chr19:15432054-15432073 | AAGAGUAGGCGCUGAGGACU | + |
| 1174 | 58525 | WIZ | intron_08 | chr19:15431182 -15432433 | chr19:15432048-15432067 | GAAGCAAAGAGUAGGCGCUG | + |
| 1175 | 58525 | WIZ | intron_08 | chr19:15431182 -15432433 | chr19:15432017-15432036 | AACUGAGCAUAGAACCUACA | - |
| 1176 | 58525 | WIZ | intron_08 | chr19:15431182 -15432433 | chr19:15432000-15432019 | AACGGGGCAGGGGGCCAUGU | + |
| 1177 | 58525 | WIZ | intron_08 | chr19:15431182 -15432433 | chr19:15431991-15432010 | GUGGGAUGUAACGGGGCAGG | + |
| 1178 | 58525 | WIZ | intron_08 | chr19:15431182 -15432433 | chr19:15431984-15432003 | GCGUUCAGUGGGAUGUAACG | + |
| 1179 | 58525 | WIZ | intron_08 | chr19:15431182 -15432433 | chr19:15431983-15432002 | GGCGUUCAGUGGGAUGUAAC | + |
| 1180 | 58525 | WIZ | intron_08 | chr19:15431182 -15432433 | chr19:15431962-15431981 | UGUGCCAAAUGGGGCCUUGG | + |
| 1181 | 58525 | WIZ | intron_08 | chr19:15431182 -15432433 | chr19:15431959-15431978 | AACUGUGCCAAAUGGGGCCU | + |
| 1182 | 58525 | WIZ | intron_08 | chr19:15431182 -15432433 | chr19:15431969-15431988 | AACGCCUCCAAGGCCCCAUU | - |
| 1183 | 58525 | WIZ | intron_08 | chr19:15431182 -15432433 | chr19:15431953-15431972 | UGAAGGAACUGUGCCAAAUG | + |
| 1184 | 58525 | WIZ | intron_08 | chr19:15431182 -15432433 | chr19:15431951-15431970 | GAUGAAGGAACUGUGCCAAA | + |
| 1185 | 58525 | WIZ | intron_08 | chr19:15431182 -15432433 | chr19:15431936-15431955 | GAGUUCAGAGCAAAGGAUGA | + |
| 1186 | 58525 | WIZ | intron_08 | chr19:15431182 -15432433 | chr19:15431919-15431938 | CUCUAAAUUUGGAGUUCAAC | - |
| 1187 | 58525 | WIZ | intron_08 | chr19:15431182 -15432433 | chr19:15431910-15431929 | UGGAGUUCAACUGGCCUCCC | - |
| 1188 | 58525 | WIZ | intron_08 | chr19:15431182 -15432433 | chr19:15431884-15431903 | UCACGUCUAGUUGUUCAAAG | + |
| 1189 | 58525 | WIZ | intron_08 | chr19:15431182 -15432433 | chr19:15431882-15431901 | UUUCACGUCUAGUUGUUCAA | + |
| 1190 | 58525 | WIZ | intron_08 | chr19:15431182 -15432433 | chr19:15431824-15431843 | AUCAGGCCCGCAGCAUCCCU | + |
| 1191 | 58525 | WIZ | intron_08 | chr19:15431182 -15432433 | chr19:15431823-15431842 | UAUCAGGCCCGCAGCAUCCC | + |
| 1192 | 58525 | WIZ | intron_08 | chr19:15431182 -15432433 | chr19:15431765-15431784 | UGACUUCGGACAGAAAGAGU | + |
| 1193 | 58525 | WIZ | intron_08 | chr19:15431182 -15432433 | chr19:15431756-15431775 | GUCCGAAGUCAGAUAGCUGU | - |
| 1194 | 58525 | WIZ | intron_08 | chr19:15431182 -15432433 | chr19:15431717-15431736 | CACAAGCUGGGCCCUAAGUG | + |
| 1195 | 58525 | WIZ | intron_08 | chr19:15431182 -15432433 | chr19:15431716-15431735 | UCACAAGCUGGGCCCUAAGU | + |
| 1196 | 58525 | WIZ | intron_08 | chr19:15431182 -15432433 | chr19:15431715-15431734 | AUCACAAGCUGGGCCCUAAG | + |
| 1197 | 58525 | WIZ | intron_08 | chr19:15431182 -15432433 | chr19:15431705-15431724 | UGGCCUACUGAUCACAAGCU | + |
| 1198 | 58525 | WIZ | intron_08 | chr19:15431182 -15432433 | chr19:15431704-15431723 | GUGGCCUACUGAUCACAAGC | + |
| 1199 | 58525 | WIZ | intron_08 | chr19:15431182 -15432433 | chr19:15431711-15431730 | GGGCCCAGCUUGUGAUCAGU | - |
| 1200 | 58525 | WIZ | intron_08 | chr19:15431182 -15432433 | chr19:15431701-15431720 | UGUGAUCAGUAGGCCACCCC | - |
| 1201 | 58525 | WIZ | intron_08 | chr19:15431182 -15432433 | chr19:15431654-15431673 | UCUCCACCAGACAAGACAGC | + |
| 1202 | 58525 | WIZ | intron_08 | chr19:15431182 -15432433 | chr19:15431557-15431576 | AACACAACACCAGGGUCAGG | + |
| 1203 | 58525 | WIZ | intron_08 | chr19:15431182 -15432433 | chr19:15431554-15431573 | UUCAACACAACACCAGGGUC | + |
| 1204 | 58525 | WIZ | intron_08 | chr19:15431182 -15432433 | chr19:15431548-15431567 | AGGGAAUUCAACACAACACC | + |
| 1205 | 58525 | WIZ | intron_08 | chr19:15431182 -15432433 | chr19:15431509-15431528 | UCUGCCUGUCUCGAGGGUGA | + |
| 1206 | 58525 | WIZ | intron_08 | chr19:15431182 -15432433 | chr19:15431503-15431522 | GGAACGUCUGCCUGUCUCGA | + |
| 1207 | 58525 | WIZ | intron_08 | chr19:15431182 -15432433 | chr19:15431502-15431521 | GGGAACGUCUGCCUGUCUCG | + |
| 1208 | 58525 | WIZ | intron_08 | chr19:15431182 -15432433 | chr19:15431482-15431501 | UCUGGGCAGAACUUGUGAGG | + |
| 1209 | 58525 | WIZ | intron_08 | chr19:15431182 -15432433 | chr19:15431480-15431499 | UCUCUGGGCAGAACUUGUGA | + |
| 1210 | 58525 | WIZ | intron_08 | chr19:15431182 -15432433 | chr19:15431479-15431498 | CUCUCUGGGCAGAACUUGUG | + |
| 1211 | 58525 | WIZ | intron_08 | chr19:15431182 -15432433 | chr19:15431464-15431483 | UCUCAAAGAAAAGAUCUCUC | + |
| 1212 | 58525 | WIZ | intron_08 | chr19:15431182 -15432433 | chr19:15431402-15431421 | CUACAGCAUGGACAGGUCUG | + |
| 1213 | 58525 | WIZ | intron_08 | chr19:15431182 -15432433 | chr19:15431400-15431419 | CACUACAGCAUGGACAGGUC | + |
| 1214 | 58525 | WIZ | intron_08 | chr19:15431182 -15432433 | chr19:15431285-15431304 | UCUGCGAAGCGACUCACCCC | + |
| 1215 | 58525 | WIZ | intron_08 | chr19:15431182 -15432433 | chr19:15431278-15431297 | GUCGCUUCGCAGAGUGAGAG | - |
| 1216 | 58525 | WIZ | intron_08 | chr19:15431182 -15432433 | chr19:15431263-15431282 | GAGAGCGGACAUCAAGGAUA | - |
| 1217 | 58525 | WIZ | intron_08 | chr19:15431182 -15432433 | chr19:15431230-15431249 | UAUACCCAGAACUAAGAAGA | + |
| 1218 | 58525 | WIZ | exon_09_c.3 | chr19:15431011 -15431150 | chr19:15431112-15431131 | CAGGCUCUUCUUAGGGAGCG | + |
| 1219 | 58525 | WIZ | exon_09_c.3 | chr19:15431011 -15431150 | chr19:15431015-15431034 | ACAGGAGCUGCAGGACCUCA | - |
| 1220 | 58525 | WIZ | exon_09_c.3 | chr19:15431011 -15431150 | chr19:15430997-15431016 | ACCUGGGCCACUCACCCUUG | + |
| 1221 | 58525 | WIZ | intron_09 | chr19:15430089 -15431011 | chr19:15430998-15431017 | UCAAGGGUGAGUGGCCCAGG | - |
| 1222 | 58525 | WIZ | intron_09 | chr19:15430089 -15431011 | chr19:15430940-15430959 | ACAGGAGCACUCUCGUGCCU | - |
| 1223 | 58525 | WIZ | intron_09 | chr19:15430089 -15431011 | chr19:15430938-15430957 | AGGAGCACUCUCGUGCCUUG | - |
| 1224 | 58525 | WIZ | intron_09 | chr19:15430089 -15431011 | chr19:15430920-15430939 | UGGGCCCCACAUUAACCCCA | + |
| 1225 | 58525 | WIZ | intron_09 | chr19:15430089 -15431011 | chr19:15430929-15430948 | CUCGUGCCUUGGGGUUAAUG | - |
| 1226 | 58525 | WIZ | intron_09 | chr19:15430089 -15431011 | chr19:15430928-15430947 | UCGUGCCUUGGGGUUAAUGU | - |
| 1227 | 58525 | WIZ | intron_09 | chr19:15430089 -15431011 | chr19:15430901-15430920 | GGAAAACUGCGGGCAACCUU | + |
| 1228 | 58525 | WIZ | intron_09 | chr19:15430089 -15431011 | chr19:15430900-15430919 | GGGAAAACUGCGGGCAACCU | + |
| 1229 | 58525 | WIZ | intron_09 | chr19:15430089 -15431011 | chr19:15430898-15430917 | GUUGCCCGCAGUUUUCCCUC | - |
| 1230 | 58525 | WIZ | intron_09 | chr19:15430089 -15431011 | chr19:15430879-15430898 | UUGGUGCCUCAAGGUGCCAG | + |
| 1231 | 58525 | WIZ | intron_09 | chr19:15430089 -15431011 | chr19:15430888-15430907 | GUUUUCCCUCUGGCACCUUG | - |
| 1232 | 58525 | WIZ | intron_09 | chr19:15430089 -15431011 | chr19:15430816-15430835 | GCUCAGGGCCACGCAUGCCC | + |
| 1233 | 58525 | WIZ | intron_09 | chr19:15430089 -15431011 | chr19:15430827-15430846 | UCUACUGUCCUGGGCAUGCG | - |
| 1234 | 58525 | WIZ | intron_09 | chr19:15430089 -15431011 | chr19:15430801-15430820 | CCCCGUGAGGGUGCAGCUCA | + |
| 1235 | 58525 | WIZ | intron_09 | chr19:15430089 -15431011 | chr19:15430800-15430819 | GCCCCGUGAGGGUGCAGCUC | + |
| 1236 | 58525 | WIZ | intron_09 | chr19:15430089 -15431011 | chr19:15430788-15430807 | AUGCUGUCCCUCGCCCCGUG | + |
| 1237 | 58525 | WIZ | intron_09 | chr19:15430089 -15431011 | chr19:15430798-15430817 | GCUGCACCCUCACGGGGCGA | - |
| 1238 | 58525 | WIZ | intron_09 | chr19:15430089 -15431011 | chr19:15430778-15430797 | GGGACAGCAUCCAGAAGCAG | - |
| 1239 | 58525 | WIZ | intron_09 | chr19:15430089 -15431011 | chr19:15430724-15430743 | CCAGAUUCAGCAAAUGAGCU | + |
| 1240 | 58525 | WIZ | intron_09 | chr19:15430089 -15431011 | chr19:15430668-15430687 | UUCUUCGUCUGUUGAUCCUA | - |
| 1241 | 58525 | WIZ | intron_09 | chr19:15430089 -15431011 | chr19:15430649-15430668 | CACUAGUCAAUAACAACCUU | + |
| 1242 | 58525 | WIZ | intron_09 | chr19:15430089 -15431011 | chr19:15430559-15430578 | UCCCCGUUCCCCAACUUGAA | + |
| 1243 | 58525 | WIZ | intron_09 | chr19:15430089 -15431011 | chr19:15430511-15430530 | GGCUCUGUGGAAGAGGGUGC | - |
| 1244 | 58525 | WIZ | intron_09 | chr19:15430089 -15431011 | chr19:15430487-15430506 | GACUGCAAGGACCAGUGUUU | - |
| 1245 | 58525 | WIZ | intron_09 | chr19:15430089 -15431011 | chr19:15430473-15430492 | UCAACUCCUGCCCGAAACAC | + |
| 1246 | 58525 | WIZ | intron_09 | chr19:15430089 -15431011 | chr19:15430486-15430505 | ACUGCAAGGACCAGUGUUUC | - |
| 1247 | 58525 | WIZ | intron_09 | chr19:15430089 -15431011 | chr19:15430482-15430501 | CAAGGACCAGUGUUUCGGGC | - |
| 1248 | 58525 | WIZ | intron_09 | chr19:15430089 -15431011 | chr19:15430441-15430460 | GGUUAGAACUUAGUUCAGUG | - |
| 1249 | 58525 | WIZ | intron_09 | chr19:15430089 -15431011 | chr19:15430434-15430453 | ACUUAGUUCAGUGAGGCAUG | - |
| 1250 | 58525 | WIZ | intron_09 | chr19:15430089 -15431011 | chr19:15430384-15430403 | CUACGGGGUGCCCUGGCAAC | + |
| 1251 | 58525 | WIZ | intron_09 | chr19:15430089 -15431011 | chr19:15430398-15430417 | GUUUGUGUGAACCUGUUGCC | - |
| 1252 | 58525 | WIZ | intron_09 | chr19:15430089 -15431011 | chr19:15430397-15430416 | UUUGUGUGAACCUGUUGCCA | - |
| 1253 | 58525 | WIZ | intron_09 | chr19:15430089 -15431011 | chr19:15430377-15430396 | UUCAGGCCUACGGGGUGCCC | + |
| 1254 | 58525 | WIZ | intron_09 | chr19:15430089 -15431011 | chr19:15430386-15430405 | CUGUUGCCAGGGCACCCCGU | - |
| 1255 | 58525 | WIZ | intron_09 | chr19:15430089 -15431011 | chr19:15430369-15430388 | CACAACCUUUCAGGCCUACG | + |
| 1256 | 58525 | WIZ | intron_09 | chr19:15430089 -15431011 | chr19:15430368-15430387 | UCACAACCUUUCAGGCCUAC | + |
| 1257 | 58525 | WIZ | intron_09 | chr19:15430089 -15431011 | chr19:15430360-15430379 | GACACCUUUCACAACCUUUC | + |
| 1258 | 58525 | WIZ | intron_09 | chr19:15430089 -15431011 | chr19:15430367-15430386 | UAGGCCUGAAAGGUUGUGAA | - |
| 1259 | 58525 | WIZ | intron_09 | chr19:15430089 -15431011 | chr19:15430356-15430375 | GGUUGUGAAAGGUGUCCCAC | - |
| 1260 | 58525 | WIZ | intron_09 | chr19:15430089 -15431011 | chr19:15430253-15430272 | CUUGGCUGCUUUGCCAAUAA | + |
| 1261 | 58525 | WIZ | intron_09 | chr19:15430089 -15431011 | chr19:15430252-15430271 | GCUUGGCUGCUUUGCCAAUA | + |
| 1262 | 58525 | WIZ | intron_09 | chr19:15430089 -15431011 | chr19:15430235-15430254 | UAACAACGCAGAGAAUAGCU | + |
| 1263 | 58525 | WIZ | intron_09 | chr19:15430089 -15431011 | chr19:15430189-15430208 | GGAAGUGUUUUGCCUCCGUC | + |
| 1264 | 58525 | WIZ | intron_09 | chr19:15430089 -15431011 | chr19:15430160-15430179 | CCUGAGAGUCCCACUCACCC | + |
| 1265 | 58525 | WIZ | intron_09 | chr19:15430089 -15431011 | chr19:15430133-15430152 | AAGCGGGAGAGCUGGGCCGU | - |
| 1266 | 58525 | WIZ | intron_09 | chr19:15430089 -15431011 | chr19:15430075-15430094 | UGGUCAGGCUCUGGGCUGAA | + |
| 1267 | 58525 | WIZ | exon_10_c | chr19:15429585 -15430089 | chr19:15430066-15430085 | CCUCGCAGGUGGUCAGGCUC | + |
| 1268 | 58525 | WIZ | exon_10_c | chr19:15429585 -15430089 | chr19:15430060-15430079 | CGCAGACCUCGCAGGUGGUC | + |
| 1269 | 58525 | WIZ | exon_10_c | chr19:15429585 -15430089 | chr19:15430069-15430088 | CCAGAGCCUGACCACCUGCG | - |
| 1270 | 58525 | WIZ | exon_10_c | chr19:15429585 -15430089 | chr19:15430052-15430071 | GCAGGCACCGCAGACCUCGC | + |
| 1271 | 58525 | WIZ | exon_10_c | chr19:15429585 -15430089 | chr19:15430007-15430026 | CAGGUGGGAGCGCGCGUGGC | + |
| 1272 | 58525 | WIZ | exon_10_c | chr19:15429585 -15430089 | chr19:15429934-15429953 | CUACGAGCUUGUGAAGCAGA | - |
| 1273 | 58525 | WIZ | exon_10_c | chr19:15429585 -15430089 | chr19:15429933-15429952 | UACGAGCUUGUGAAGCAGAA | - |
| 1274 | 58525 | WIZ | exon_10_c | chr19:15429585 -15430089 | chr19:15429911-15429930 | GUCUGCCUGACGCCCACCUU | - |
| 1275 | 58525 | WIZ | exon_10_c | chr19:15429585 -15430089 | chr19:15429848-15429867 | AGGUGGUCGCCGGGGCCCCC | - |
| 1276 | 58525 | WIZ | exon_10_c | chr19:15429585 -15430089 | chr19:15429843-15429862 | GUCGCCGGGGCCCCCCGGCC | - |
| 1277 | 58525 | WIZ | exon_10_c | chr19:15429585 -15430089 | chr19:15429756-15429775 | AGGCCCUUGGCCGAGAAGCC | + |
| 1278 | 58525 | WIZ | exon_10_c | chr19:15429585 -15430089 | chr19:15429769-15429788 | CAAGUCGCCUCCCGGCUUCU | - |
| 1279 | 58525 | WIZ | exon_10_c | chr19:15429585 -15430089 | chr19:15429715-15429734 | ACUCCUCAAAAAGACACCAC | - |
| 1280 | 58525 | WIZ | exon_10_c | chr19:15429585 -15430089 | chr19:15429625-15429644 | GUGCCUUUGGGGAGGCCGGC | + |
| 1281 | 58525 | WIZ | exon_10_c | chr19:15429585 -15430089 | chr19:15429612-15429631 | GACUGAGGCCACUGUGCCUU | + |
| 1282 | 58525 | WIZ | exon_10_c | chr19:15429585 -15430089 | chr19:15429604-15429623 | GUGGCCUCAGUCUGAGGAUG | - |
| 1283 | 58525 | WIZ | exon_10_c | chr19:15429585 -15430089 | chr19:15429603-15429622 | UGGCCUCAGUCUGAGGAUGA | - |
| 1284 | 58525 | WIZ | exon_10_c | chr19:15429585 -15430089 | chr19:15429602-15429621 | GGCCUCAGUCUGAGGAUGAG | - |
| 1285 | 58525 | WIZ | intron_10 | chr19:15428508 -15429585 | chr19:15429568-15429587 | CUUGGGACCCACACUCACUG | + |
| 1286 | 58525 | WIZ | intron_10 | chr19:15428508 -15429585 | chr19:15429551-15429570 | CAGAACCUCCCUCGGCUCUU | + |
| 1287 | 58525 | WIZ | intron_10 | chr19:15428508 -15429585 | chr19:15429550-15429569 | CCAGAACCUCCCUCGGCUCU | + |
| 1288 | 58525 | WIZ | intron_10 | chr19:15428508 -15429585 | chr19:15429563-15429582 | AGUGUGGGUCCCAAGAGCCG | - |
| 1289 | 58525 | WIZ | intron_10 | chr19:15428508 -15429585 | chr19:15429553-15429572 | CCAAGAGCCGAGGGAGGUUC | - |
| 1290 | 58525 | WIZ | intron_10 | chr19:15428508 -15429585 | chr19:15429547-15429566 | GCCGAGGGAGGUUCUGGCGC | - |
| 1291 | 58525 | WIZ | intron_10 | chr19:15428508 -15429585 | chr19:15429546-15429565 | CCGAGGGAGGUUCUGGCGCU | - |
| 1292 | 58525 | WIZ | intron_10 | chr19:15428508 -15429585 | chr19:15429537-15429556 | GUUCUGGCGCUGGGAGGGUC | - |
| 1293 | 58525 | WIZ | intron_10 | chr19:15428508 -15429585 | chr19:15429510-15429529 | CUGGGCUACAGCCCAACCUG | + |
| 1294 | 58525 | WIZ | intron_10 | chr19:15428508 -15429585 | chr19:15429524-15429543 | GAGGGUCGGGACCUCAGGUU | - |
| 1295 | 58525 | WIZ | intron_10 | chr19:15428508 -15429585 | chr19:15429512-15429531 | CUCAGGUUGGGCUGUAGCCC | - |
| 1296 | 58525 | WIZ | intron_10 | chr19:15428508 -15429585 | chr19:15429498-15429517 | UAGCCCAGGGACAGGGCCCA | - |
| 1297 | 58525 | WIZ | intron_10 | chr19:15428508 -15429585 | chr19:15429459-15429478 | GGACUACAGCUCCCAUGUCC | - |
| 1298 | 58525 | WIZ | intron_10 | chr19:15428508 -15429585 | chr19:15429458-15429477 | GACUACAGCUCCCAUGUCCU | - |
| 1299 | 58525 | WIZ | intron_10 | chr19:15428508 -15429585 | chr19:15429432-15429451 | GACCAAUACUCUGGCCUGGC | + |
| 1300 | 58525 | WIZ | intron_10 | chr19:15428508 -15429585 | chr19:15429428-15429447 | GCUUGACCAAUACUCUGGCC | + |
| 1301 | 58525 | WIZ | intron_10 | chr19:15428508 -15429585 | chr19:15429423-15429442 | CAGAGGCUUGACCAAUACUC | + |
| 1302 | 58525 | WIZ | intron_10 | chr19:15428508 -15429585 | chr19:15429406-15429425 | CGGCCCAAAAGGAGAUGCAG | + |
| 1303 | 58525 | WIZ | intron_10 | chr19:15428508 -15429585 | chr19:15429395-15429414 | CACAUCCAAGGCGGCCCAAA | + |
| 1304 | 58525 | WIZ | intron_10 | chr19:15428508 -15429585 | chr19:15429403-15429422 | CAUCUCCUUUUGGGCCGCCU | - |
| 1305 | 58525 | WIZ | intron_10 | chr19:15428508 -15429585 | chr19:15429386-15429405 | GGCACGAUCCACAUCCAAGG | + |
| 1306 | 58525 | WIZ | intron_10 | chr19:15428508 -15429585 | chr19:15429397-15429416 | CUUUUGGGCCGCCUUGGAUG | - |
| 1307 | 58525 | WIZ | intron_10 | chr19:15428508 -15429585 | chr19:15429383-15429402 | GGAGGCACGAUCCACAUCCA | + |
| 1308 | 58525 | WIZ | intron_10 | chr19:15428508 -15429585 | chr19:15429365-15429384 | GAUCAGCAAAGUAAAGUGGG | + |
| 1309 | 58525 | WIZ | intron_10 | chr19:15428508 -15429585 | chr19:15429362-15429381 | GAAGAUCAGCAAAGUAAAGU | + |
| 1310 | 58525 | WIZ | intron_10 | chr19:15428508 -15429585 | chr19:15429340-15429359 | AGCCGCAGUGAGGCUUUCAG | + |
| 1311 | 58525 | WIZ | intron_10 | chr19:15428508 -15429585 | chr19:15429330-15429349 | CAGGCUCAUCAGCCGCAGUG | + |
| 1312 | 58525 | WIZ | intron_10 | chr19:15428508 -15429585 | chr19:15429327-15429346 | UGCGGCUGAUGAGCCUGCCA | - |
| 1313 | 58525 | WIZ | intron_10 | chr19:15428508 -15429585 | chr19:15429297-15429316 | CGCCACUGAGGGGCAGCUCU | - |
| 1314 | 58525 | WIZ | intron_10 | chr19:15428508 -15429585 | chr19:15429278-15429297 | UUGGCUUUCUCUGGGCCUGU | - |
| 1315 | 58525 | WIZ | intron_10 | chr19:15428508 -15429585 | chr19:15429255-15429274 | UAGGGGCGGUGAAGGUAACC | - |
| 1316 | 58525 | WIZ | intron_10 | chr19:15428508 -15429585 | chr19:15429254-15429273 | AGGGGCGGUGAAGGUAACCA | - |
| 1317 | 58525 | WIZ | intron_10 | chr19:15428508 -15429585 | chr19:15429234-15429253 | AAGCUAGGCCACAGGAACCC | + |
| 1318 | 58525 | WIZ | intron_10 | chr19:15428508 -15429585 | chr19:15429245-15429264 | GAAGGUAACCAGGGUUCCUG | - |
| 1319 | 58525 | WIZ | intron_10 | chr19:15428508 -15429585 | chr19:15429226-15429245 | CACUGAGAAAGCUAGGCCAC | + |
| 1320 | 58525 | WIZ | intron_10 | chr19:15428508 -15429585 | chr19:15429228-15429247 | CUGUGGCCUAGCUUUCUCAG | - |
| 1321 | 58525 | WIZ | intron_10 | chr19:15428508 -15429585 | chr19:15429221-15429240 | CUAGCUUUCUCAGUGGUAGU | - |
| 1322 | 58525 | WIZ | intron_10 | chr19:15428508 -15429585 | chr19:15429201-15429220 | UGGAAGCAUCUUGGAUAGAC | - |
| 1323 | 58525 | WIZ | intron_10 | chr19:15428508 -15429585 | chr19:15429199-15429218 | GAAGCAUCUUGGAUAGACAG | - |
| 1324 | 58525 | WIZ | intron_10 | chr19:15428508 -15429585 | chr19:15429169-15429188 | AAUCGUGGGCACCUCCCAUC | + |
| 1325 | 58525 | WIZ | intron_10 | chr19:15428508 -15429585 | chr19:15429183-15429202 | ACAGGGGAUCACCUGAUGGG | - |
| 1326 | 58525 | WIZ | intron_10 | chr19:15428508 -15429585 | chr19:15429170-15429189 | UGAUGGGAGGUGCCCACGAU | - |
| 1327 | 58525 | WIZ | intron_10 | chr19:15428508 -15429585 | chr19:15429155-15429174 | UUGAUGACAGGACCAAUCGU | + |
| 1328 | 58525 | WIZ | intron_10 | chr19:15428508 -15429585 | chr19:15429154-15429173 | CUUGAUGACAGGACCAAUCG | + |
| 1329 | 58525 | WIZ | intron_10 | chr19:15428508 -15429585 | chr19:15429118-15429137 | AGAGAGCUGCCUCUGCGUGG | + |
| 1330 | 58525 | WIZ | intron_10 | chr19:15428508 -15429585 | chr19:15429067-15429086 | UGCCUGUGGGCACGGCAGGC | - |
| 1331 | 58525 | WIZ | intron_10 | chr19:15428508 -15429585 | chr19:15429060-15429079 | GGGCACGGCAGGCAGGGUUU | - |
| 1332 | 58525 | WIZ | intron_10 | chr19:15428508 -15429585 | chr19:15429028-15429047 | ACCUGCUCACUGCACCUGGA | + |
| 1333 | 58525 | WIZ | intron_10 | chr19:15428508 -15429585 | chr19:15429027-15429046 | AACCUGCUCACUGCACCUGG | + |
| 1334 | 58525 | WIZ | intron_10 | chr19:15428508 -15429585 | chr19:15429024-15429043 | UUAAACCUGCUCACUGCACC | + |
| 1335 | 58525 | WIZ | intron_10 | chr19:15428508 -15429585 | chr19:15429022-15429041 | UGCAGUGAGCAGGUUUAACA | - |
| 1336 | 58525 | WIZ | intron_10 | chr19:15428508 -15429585 | chr19:15428992-15429011 | GGGAAAGCCUGAUGUUGUAA | + |
| 1337 | 58525 | WIZ | intron_10 | chr19:15428508 -15429585 | chr19:15428991-15429010 | UGGGAAAGCCUGAUGUUGUA | + |
| 1338 | 58525 | WIZ | intron_10 | chr19:15428508 -15429585 | chr19:15429002-15429021 | AGGACGUCCCUUACAACAUC | - |
| 1339 | 58525 | WIZ | intron_10 | chr19:15428508 -15429585 | chr19:15428972-15428991 | UCUAAUGUCCACAAAGAUAU | + |
| 1340 | 58525 | WIZ | intron_10 | chr19:15428508 -15429585 | chr19:15428971-15428990 | CUCUAAUGUCCACAAAGAUA | + |
| 1341 | 58525 | WIZ | intron_10 | chr19:15428508 -15429585 | chr19:15428966-15428985 | UUGUGGACAUUAGAGUCUGG | - |
| 1342 | 58525 | WIZ | intron_10 | chr19:15428508 -15429585 | chr19:15428921-15428940 | AAUGGGGGGCUCCAUUGGGC | + |
| 1343 | 58525 | WIZ | intron_10 | chr19:15428508 -15429585 | chr19:15428917-15428936 | GCCAAAUGGGGGGCUCCAUU | + |
| 1344 | 58525 | WIZ | intron_10 | chr19:15428508 -15429585 | chr19:15428916-15428935 | UGCCAAAUGGGGGGCUCCAU | + |
| 1345 | 58525 | WIZ | intron_10 | chr19:15428508 -15429585 | chr19:15428921-15428940 | GCCCAAUGGAGCCCCCCAUU | - |
| 1346 | 58525 | WIZ | intron_10 | chr19:15428508 -15429585 | chr19:15428906-15428925 | GAACAUAAGGUGCCAAAUGG | + |
| 1347 | 58525 | WIZ | intron_10 | chr19:15428508 -15429585 | chr19:15428905-15428924 | GGAACAUAAGGUGCCAAAUG | + |
| 1348 | 58525 | WIZ | intron_10 | chr19:15428508 -15429585 | chr19:15428904-15428923 | GGGAACAUAAGGUGCCAAAU | + |
| 1349 | 58525 | WIZ | intron_10 | chr19:15428508 -15429585 | chr19:15428893-15428912 | AGCAACUUCAAGGGAACAUA | + |
| 1350 | 58525 | WIZ | intron_10 | chr19:15428508 -15429585 | chr19:15428883-15428902 | ACUCAGUGGAAGCAACUUCA | + |
| 1351 | 58525 | WIZ | intron_10 | chr19:15428508 -15429585 | chr19:15428869-15428888 | UGGAAGCACGGCAGACUCAG | + |
| 1352 | 58525 | WIZ | intron_10 | chr19:15428508 -15429585 | chr19:15428870-15428889 | ACUGAGUCUGCCGUGCUUCC | - |
| 1353 | 58525 | WIZ | intron_10 | chr19:15428508 -15429585 | chr19:15428864-15428883 | UCUGCCGUGCUUCCAGGGGC | - |
| 1354 | 58525 | WIZ | intron_10 | chr19:15428508 -15429585 | chr19:15428863-15428882 | CUGCCGUGCUUCCAGGGGCA | - |
| 1355 | 58525 | WIZ | intron_10 | chr19:15428508 -15429585 | chr19:15428788-15428807 | CCUGCUAUGGGAGCUAUUUG | + |
| 1356 | 58525 | WIZ | intron_10 | chr19:15428508 -15429585 | chr19:15428786-15428805 | UCCCUGCUAUGGGAGCUAUU | + |
| 1357 | 58525 | WIZ | intron_10 | chr19:15428508 -15429585 | chr19:15428791-15428810 | CCCCAAAUAGCUCCCAUAGC | - |
| 1358 | 58525 | WIZ | intron_10 | chr19:15428508 -15429585 | chr19:15428790-15428809 | CCCAAAUAGCUCCCAUAGCA | - |
| 1359 | 58525 | WIZ | intron_10 | chr19:15428508 -15429585 | chr19:15428776-15428795 | UCCCCUAGGAUCCCUGCUAU | + |
| 1360 | 58525 | WIZ | intron_10 | chr19:15428508 -15429585 | chr19:15428775-15428794 | CUCCCCUAGGAUCCCUGCUA | + |
| 1361 | 58525 | WIZ | intron_10 | chr19:15428508 -15429585 | chr19:15428782-15428801 | GCUCCCAUAGCAGGGAUCCU | - |
| 1362 | 58525 | WIZ | intron_10 | chr19:15428508 -15429585 | chr19:15428781-15428800 | CUCCCAUAGCAGGGAUCCUA | - |
| 1363 | 58525 | WIZ | intron_10 | chr19:15428508 -15429585 | chr19:15428730-15428749 | ACAGGCAGUGACCAAAUUCU | + |
| 1364 | 58525 | WIZ | intron_10 | chr19:15428508 -15429585 | chr19:15428744-15428763 | GUAUCUGAUUACCUAGAAUU | - |
| 1365 | 58525 | WIZ | intron_10 | chr19:15428508 -15429585 | chr19:15428712-15428731 | CUUAAGGACUUUGGGUAGAC | + |
| 1366 | 58525 | WIZ | intron_10 | chr19:15428508 -15429585 | chr19:15428704-15428723 | GUAGAGAGCUUAAGGACUUU | + |
| 1367 | 58525 | WIZ | intron_10 | chr19:15428508 -15429585 | chr19:15428703-15428722 | UGUAGAGAGCUUAAGGACUU | + |
| 1368 | 58525 | WIZ | intron_10 | chr19:15428508 -15429585 | chr19:15428678-15428697 | CCUAGCCCUUUGGCAUCGAG | + |
| 1369 | 58525 | WIZ | intron_10 | chr19:15428508 -15429585 | chr19:15428677-15428696 | GCCUAGCCCUUUGGCAUCGA | + |
| 1370 | 58525 | WIZ | intron_10 | chr19:15428508 -15429585 | chr19:15428676-15428695 | UGCCUAGCCCUUUGGCAUCG | + |
| 1371 | 58525 | WIZ | intron_10 | chr19:15428508 -15429585 | chr19:15428687-15428706 | UACACUCCCCUCGAUGCCAA | - |
| 1372 | 58525 | WIZ | intron_10 | chr19:15428508 -15429585 | chr19:15428686-15428705 | ACACUCCCCUCGAUGCCAAA | - |
| 1373 | 58525 | WIZ | intron_10 | chr19:15428508 -15429585 | chr19:15428681-15428700 | CCCCUCGAUGCCAAAGGGCU | - |
| 1374 | 58525 | WIZ | intron_10 | chr19:15428508 -15429585 | chr19:15428677-15428696 | UCGAUGCCAAAGGGCUAGGC | - |
| 1375 | 58525 | WIZ | intron_10 | chr19:15428508 -15429585 | chr19:15428622-15428641 | GAAAUCUGCGGCCUGAGUCU | - |
| 1376 | 58525 | WIZ | intron_10 | chr19:15428508 -15429585 | chr19:15428594-15428613 | UUGGCUGCUCAGGCAGUUGG | + |
| 1377 | 58525 | WIZ | intron_10 | chr19:15428508 -15429585 | chr19:15428592-15428611 | UUUUGGCUGCUCAGGCAGUU | + |
| 1378 | 58525 | WIZ | intron_10 | chr19:15428508 -15429585 | chr19:15428569-15428588 | ACACCAGACCCUCCUACCUC | - |
| 1379 | 58525 | WIZ | intron_10 | chr19:15428508 -15429585 | chr19:15428542-15428561 | CGCCACCUUGGCCGGCCUUG | + |
| 1380 | 58525 | WIZ | intron_10 | chr19:15428508 -15429585 | chr19:15428541-15428560 | CCGCCACCUUGGCCGGCCUU | + |
| 1381 | 58525 | WIZ | intron_10 | chr19:15428508 -15429585 | chr19:15428540-15428559 | GCCGCCACCUUGGCCGGCCU | + |
| 1382 | 58525 | WIZ | intron_10 | chr19:15428508 -15429585 | chr19:15428534-15428553 | UUCACGGCCGCCACCUUGGC | + |
| 1383 | 58525 | WIZ | intron_10 | chr19:15428508 -15429585 | chr19:15428530-15428549 | GGGGUUCACGGCCGCCACCU | + |
| 1384 | 58525 | WIZ | intron_10 | chr19:15428508 -15429585 | chr19:15428510-15428529 | UGCGGAGACAAAACACAGGG | + |
| 1385 | 58525 | WIZ | intron_10 | chr19:15428508 -15429585 | chr19:15428509-15428528 | CUGCGGAGACAAAACACAGG | + |
| 1386 | 58525 | WIZ | intron_10 | chr19:15428508 -15429585 | chr19:15428508-15428527 | GCUGCGGAGACAAAACACAG | + |
| 1387 | 58525 | WIZ | intron_10 | chr19:15428508 -15429585 | chr19:15428492-15428511 | CCCGUCACUAUCUAAAGCUG | + |
| 1388 | 58525 | WIZ | exon_11_c | chr19:15428109 -15428508 | chr19:15428496-15428515 | UCCGCAGCUUUAGAUAGUGA | - |
| 1389 | 58525 | WIZ | exon_11_c | chr19:15428109 -15428508 | chr19:15428495-15428514 | CCGCAGCUUUAGAUAGUGAC | - |
| 1390 | 58525 | WIZ | exon_11_c | chr19:15428109 -15428508 | chr19:15428494-15428513 | CGCAGCUUUAGAUAGUGACG | - |
| 1391 | 58525 | WIZ | exon_11_c | chr19:15428109 -15428508 | chr19:15428493-15428512 | GCAGCUUUAGAUAGUGACGG | - |
| 1392 | 58525 | WIZ | exon_11_c | chr19:15428109 -15428508 | chr19:15428452-15428471 | CAAACCAGGCACCGCACAGC | + |
| 1393 | 58525 | WIZ | exon_11_c | chr19:15428109 -15428508 | chr19:15428416-15428435 | GGGCACGGGCGUGGCUAGAC | + |
| 1394 | 58525 | WIZ | exon_11_c | chr19:15428109 -15428508 | chr19:15428396-15428415 | GACGCCCAGGUGGCGCAGGU | + |
| 1395 | 58525 | WIZ | exon_11_c | chr19:15428109 -15428508 | chr19:15428392-15428411 | CGCUGACGCCCAGGUGGCGC | + |
| 1396 | 58525 | WIZ | exon_11_c | chr19:15428109 -15428508 | chr19:15428403-15428422 | CGUGCCCACCUGCGCCACCU | - |
| 1397 | 58525 | WIZ | exon_11_c | chr19:15428109 -15428508 | chr19:15428386-15428405 | CCGGAUCGCUGACGCCCAGG | + |
| 1398 | 58525 | WIZ | exon_11_c | chr19:15428109 -15428508 | chr19:15428383-15428402 | CGUCCGGAUCGCUGACGCCC | + |
| 1399 | 58525 | WIZ | exon_11_c | chr19:15428109 -15428508 | chr19:15428367-15428386 | AUGGGGGAUCCCUUGGCGUC | + |
| 1400 | 58525 | WIZ | exon_11_c | chr19:15428109 -15428508 | chr19:15428380-15428399 | CGUCAGCGAUCCGGACGCCA | - |
| 1401 | 58525 | WIZ | exon_11_c | chr19:15428109 -15428508 | chr19:15428379-15428398 | GUCAGCGAUCCGGACGCCAA | - |
| 1402 | 58525 | WIZ | exon_11_c | chr19:15428109 -15428508 | chr19:15428360-15428379 | CACGUCUAUGGGGGAUCCCU | + |
| 1403 | 58525 | WIZ | exon_11_c | chr19:15428109 -15428508 | chr19:15428351-15428370 | CCCGUGGAGCACGUCUAUGG | + |
| 1404 | 58525 | WIZ | exon_11_c | chr19:15428109 -15428508 | chr19:15428350-15428369 | GCCCGUGGAGCACGUCUAUG | + |
| 1405 | 58525 | WIZ | exon_11_c | chr19:15428109 -15428508 | chr19:15428349-15428368 | AGCCCGUGGAGCACGUCUAU | + |
| 1406 | 58525 | WIZ | exon_11_c | chr19:15428109 -15428508 | chr19:15428348-15428367 | GAGCCCGUGGAGCACGUCUA | + |
| 1407 | 58525 | WIZ | exon_11_c | chr19:15428109 -15428508 | chr19:15428355-15428374 | UCCCCCAUAGACGUGCUCCA | - |
| 1408 | 58525 | WIZ | exon_11_c | chr19:15428109 -15428508 | chr19:15428354-15428373 | CCCCCAUAGACGUGCUCCAC | - |
| 1409 | 58525 | WIZ | exon_11_c | chr19:15428109 -15428508 | chr19:15428345-15428364 | ACGUGCUCCACGGGCUCAUC | - |
| 1410 | 58525 | WIZ | exon_11_c | chr19:15428109 -15428508 | chr19:15428342-15428361 | UGCUCCACGGGCUCAUCAGG | - |
| 1411 | 58525 | WIZ | exon_11_c | chr19:15428109 -15428508 | chr19:15428341-15428360 | GCUCCACGGGCUCAUCAGGA | - |
| 1412 | 58525 | WIZ | exon_11_c | chr19:15428109 -15428508 | chr19:15428337-15428356 | CACGGGCUCAUCAGGAGGGA | - |
| 1413 | 58525 | WIZ | exon_11_c | chr19:15428109 -15428508 | chr19:15428308-15428327 | GCCUGGGUGGGAGGCGGAUC | + |
| 1414 | 58525 | WIZ | exon_11_c | chr19:15428109 -15428508 | chr19:15428296-15428315 | CCAGGGCGCCGCGCCUGGGU | + |
| 1415 | 58525 | WIZ | exon_11_c | chr19:15428109 -15428508 | chr19:15428307-15428326 | AUCCGCCUCCCACCCAGGCG | - |
| 1416 | 58525 | WIZ | exon_11_c | chr19:15428109 -15428508 | chr19:15428299-15428318 | CCCACCCAGGCGCGGCGCCC | - |
| 1417 | 58525 | WIZ | exon_11_c | chr19:15428109 -15428508 | chr19:15428289-15428308 | CGCGGCGCCCUGGCCCACCC | - |
| 1418 | 58525 | WIZ | exon_11_c | chr19:15428109 -15428508 | chr19:15428273-15428292 | GGGAGGCGGCCGCCCCGGGU | + |
| 1419 | 58525 | WIZ | exon_11_c | chr19:15428109 -15428508 | chr19:15428225-15428244 | CUUCUUGGCCGGCGGUGGGG | + |
| 1420 | 58525 | WIZ | exon_11_c | chr19:15428109 -15428508 | chr19:15428217-15428236 | AGCUUGGCCUUCUUGGCCGG | + |
| 1421 | 58525 | WIZ | exon_11_c | chr19:15428109 -15428508 | chr19:15428201-15428220 | CAUACCCGCGGCCUUCAGCU | + |
| 1422 | 58525 | WIZ | exon_11_c | chr19:15428109 -15428508 | chr19:15428208-15428227 | AAGGCCAAGCUGAAGGCCGC | - |
| 1423 | 58525 | WIZ | exon_11_c | chr19:15428109 -15428508 | chr19:15428203-15428222 | CAAGCUGAAGGCCGCGGGUA | - |
| 1424 | 58525 | WIZ | exon_11_c | chr19:15428109 -15428508 | chr19:15428189-15428208 | CCAGGGGCUGGCCAUACCCG | + |
| 1425 | 58525 | WIZ | exon_11_c | chr19:15428109 -15428508 | chr19:15428192-15428211 | CCGCGGGUAUGGCCAGCCCC | - |
| 1426 | 58525 | WIZ | exon_11_c | chr19:15428109 -15428508 | chr19:15428191-15428210 | CGCGGGUAUGGCCAGCCCCU | - |
| 1427 | 58525 | WIZ | exon_11-c | chr19:15428109 -15428508 | chr19:15428189-15428208 | CGGGUAUGGCCAGCCCCUGG | - |
| 1428 | 58525 | WIZ | exon_11_c | chr19:15428109 -15428508 | chr19:15428135-15428154 | AUCAGAGGCCCAGAAAAUGC | + |
| 1429 | 58525 | WIZ | exon_11_c | chr19:15428109 -15428508 | chr19:15428147-15428166 | CCGCAGCCGCCGGCAUUUUC | - |
| 1430 | 58525 | WIZ | exon_11_c | chr19:15428109 -15428508 | chr19:15428146-15428165 | CGCAGCCGCCGGCAUUUUCU | - |
| 1431 | 58525 | WIZ | exon_11_c | chr19:15428109 -15428508 | chr19:15428120-15428139 | AGGAGACGGCUCCACAUCAG | + |
| 1432 | 58525 | WIZ | exon_11_c | chr19:15428109 -15428508 | chr19:15428100-15428119 | GAGAACCUACAGAGGUUGAG | + |
| 1433 | 58525 | WIZ | exon_11_c | chr19:15428109 -15428508 | chr19:15428108-15428127 | CGUCUCCUCUCAACCUCUGU | - |
| 1434 | 58525 | WIZ | intron_11 | chr19:15427533 -15428109 | chr19:15428092-15428111 | GCUGAAGCGAGAACCUACAG | + |
| 1435 | 58525 | WIZ | intron_11 | chr19:15427533 -15428109 | chr19:15428041-15428060 | UGUGACCCCCCCCCCGGGAG | + |
| 1436 | 58525 | WIZ | intron_11 | chr19:15427533 -15428109 | chr19:15428040-15428059 | CUGUGACCCCCCCCCCGGGA | + |
| 1437 | 58525 | WIZ | intron_11 | chr19:15427533 -15428109 | chr19:15428039-15428058 | GCUGUGACCCCCCCCCCGGG | + |
| 1438 | 58525 | WIZ | intron_11 | chr19:15427533 -15428109 | chr19:15428052-15428071 | CCCUGGAGCCCCUCCCGGGG | - |
| 1439 | 58525 | WIZ | intron_11 | chr19:15427533 -15428109 | chr19:15428011-15428030 | GUCUACUCCCUGCCCCAGCA | + |
| 1440 | 58525 | WIZ | intron_11 | chr19:15427533 -15428109 | chr19:15427983-15428002 | CAGAACCGGCCCACUGCCAA | + |
| 1441 | 58525 | WIZ | intron_11 | chr19:15427533 -15428109 | chr19:15427995-15428014 | AGACAGGGGCCCUUGGCAGU | - |
| 1442 | 58525 | WIZ | intron_11 | chr19:15427533 -15428109 | chr19:15427969-15427988 | ACAAGAUCUCUGGGCAGAAC | + |
| 1443 | 58525 | WIZ | intron_11 | chr19:15427533 -15428109 | chr19:15427960-15427979 | CCACUGCCAACAAGAUCUCU | + |
| 1444 | 58525 | WIZ | intron_11 | chr19:15427533 -15428109 | chr19:15427969-15427988 | GUUCUGCCCAGAGAUCUUGU | - |
| 1445 | 58525 | WIZ | intron_11 | chr19:15427533 -15428109 | chr19:15427954-15427973 | CUUGUUGGCAGUGGGCUGCU | - |
| 1446 | 58525 | WIZ | intron_11 | chr19:15427533 -15428109 | chr19:15427908-15427927 | AUUCUCAGGAAGGGUCAUGG | + |
| 1447 | 58525 | WIZ | intron_11 | chr19:15427533 -15428109 | chr19:15427905-15427924 | UUCAUUCUCAGGAAGGGUCA | + |
| 1448 | 58525 | WIZ | intron_11 | chr19:15427533 -15428109 | chr19:15427894-15427913 | CCACCUUGGCCUUCAUUCUC | + |
| 1449 | 58525 | WIZ | intron_11 | chr19:15427533 -15428109 | chr19:15427896-15427915 | CUGAGAAUGAAGGCCAAGGU | - |
| 1450 | 58525 | WIZ | intron_11 | chr19:15427533 -15428109 | chr19:15427895-15427914 | UGAGAAUGAAGGCCAAGGUG | - |
| 1451 | 58525 | WIZ | intron_11 | chr19:15427533 -15428109 | chr19:15427861-15427880 | UGGGUGCUCUGCACACUAAA | + |
| 1452 | 58525 | WIZ | intron_11 | chr19:15427533 -15428109 | chr19:15427830-15427849 | GUGCUAUGUGCCAUCCAGAC | + |
| 1453 | 58525 | WIZ | intron_11 | chr19:15427533 -15428109 | chr19:15427791-15427810 | GUCCCAACAAGGACAGGGUG | + |
| 1454 | 58525 | WIZ | intron_11 | chr19:15427533 -15428109 | chr19:15427796-15427815 | UGCCUCACCCUGUCCUUGUU | - |
| 1455 | 58525 | WIZ | intron_11 | chr19:15427533 -15428109 | chr19:15427780-15427799 | UUGCUCUGUGGGUCCCAACA | + |
| 1456 | 58525 | WIZ | intron_11 | chr19:15427533 -15428109 | chr19:15427769-15427788 | CCAAGAUUCCAUUGCUCUGU | + |
| 1457 | 58525 | WIZ | intron_11 | chr19:15427533 -15428109 | chr19:15427768-15427787 | ACCAAGAUUCCAUUGCUCUG | + |
| 1458 | 58525 | WIZ | intron_11 | chr19:15427533 -15428109 | chr19:15427740-15427759 | GCCCUCAGUCCUGGCGGAGG | + |
| 1459 | 58525 | WIZ | intron_11 | chr19:15427533 -15428109 | chr19:15427737-15427756 | UGGGCCCUCAGUCCUGGCGG | + |
| 1460 | 58525 | WIZ | intron_11 | chr19:15427533 -15428109 | chr19:15427734-15427753 | ACAUGGGCCCUCAGUCCUGG | + |
| 1461 | 58525 | WIZ | intron_11 | chr19:15427533 -15428109 | chr19:15427745-15427764 | AUCCUCCUCCGCCAGGACUG | - |
| 1462 | 58525 | WIZ | intron_11 | chr19:15427533 -15428109 | chr19:15427744-15427763 | UCCUCCUCCGCCAGGACUGA | - |
| 1463 | 58525 | WIZ | intron_11 | chr19:15427533 -15428109 | chr19:15427697-15427716 | AGAUACCCGGCAGGAGUGAG | + |
| 1464 | 58525 | WIZ | intron_11 | chr19:15427533 -15428109 | chr19:15427695-15427714 | CCAGAUACCCGGCAGGAGUG | + |
| 1465 | 58525 | WIZ | intron_11 | chr19:15427533 -15428109 | chr19:15427688-15427707 | CUGGGGGCCAGAUACCCGGC | + |
| 1466 | 58525 | WIZ | intron_11 | chr19:15427533 -15428109 | chr19:15427638-15427657 | CAGGUUAGGGUGGUGAGGGC | + |
| 1467 | 58525 | WIZ | intron_11 | chr19:15427533 -15428109 | chr19:15427628-15427647 | AGCACGCCCACAGGUUAGGG | + |
| 1468 | 58525 | WIZ | intron_11 | chr19:15427533 -15428109 | chr19:15427638-15427657 | GCCCUCACCACCCUAACCUG | - |
| 1469 | 58525 | WIZ | intron 11 | chr19:15427533 -15428109 | chr19:15427598-15427617 | UGUCCUGGUCGGCUGGGCGU | + |
| 1470 | 58525 | WIZ | intron 11 | chr19:15427533 -15428109 | chr19:15427592-15427611 | CAGGAGUGUCCUGGUCGGCU | + |
| 1471 | 58525 | WIZ | intron 11 | chr19:15427533 -15428109 | chr19:15427548-15427567 | GAAAGGGGCAGUUAGCAUCG | + |
| 1472 | 58525 | WIZ | exon_12_c | chr19:15426981 -15427533 | chr19:15427503-15427522 | CGGAUGUCUCGUGCUGGCUC | + |
| 1473 | 58525 | WIZ | exon_12_c | chr19:15426981 -15427533 | chr19:15427497-15427516 | UCGCAGCGGAUGUCUCGUGC | + |
| 1474 | 58525 | WIZ | exon_12_c | chr19:15426981 -15427533 | chr19:15427483-15427502 | ACUCACCACAGAACUCGCAG | + |
| 1475 | 58525 | WIZ | exon_12_c | chr19:15426981 -15427533 | chr19:15427421-15427440 | CACGCCCAUUUGCCGCAGAU | + |
| 1476 | 58525 | WIZ | exon_12_c | chr19:15426981 -15427533 | chr19:15427420-15427439 | UCACGCCCAUUUGCCGCAGA | + |
| 1477 | 58525 | WIZ | exon_12_c | chr19:15426981 -15427533 | chr19:15427429-15427448 | GCGCUCCCAUCUGCGGCAAA | - |
| 1478 | 58525 | WIZ | exon_12_c | chr19:15426981 -15427533 | chr19:15427428-15427447 | CGCUCCCAUCUGCGGCAAAU | - |
| 1479 | 58525 | WIZ | exon_12_c | chr19:15426981 -15427533 | chr19:15427381-15427400 | CUCGCCCAUCGACACGCUGC | - |
| 1480 | 58525 | WIZ | exon_12_c | chr19:15426981 -15427533 | chr19:15427337-15427356 | AGGUCCACCAGGCCGAGACU | + |
| 1481 | 58525 | WIZ | exon_12_c | chr19:15426981 -15427533 | chr19:15427347-15427366 | AGACGGACCCAGUCUCGGCC | - |
| 1482 | 58525 | WIZ | exon_12_c | chr19:15426981 -15427533 | chr19:15427344-15427363 | CGGACCCAGUCUCGGCCUGG | - |
| 1483 | 58525 | WIZ | exon_12_c | chr19:15426981 -15427533 | chr19:15427326-15427345 | GGUGGACCUCCCAACCCACC | - |
| 1484 | 58525 | WIZ | exon_12_c | chr19:15426981 -15427533 | chr19:15427249-15427268 | ACUGGAAGCCCGCAGCCCCU | - |
| 1485 | 58525 | WIZ | exon_12_c | chr19:15426981 -15427533 | chr19:15427192-15427211 | ACCACCACCGGGCAGCCCCC | - |
| 1486 | 58525 | WIZ | exon_12_c | chr19:15426981 -15427533 | chr19:15427151-15427170 | UCGGGCCGUAGGAGGAGGAG | + |
| 1487 | 58525 | WIZ | exon_12_c | chr19:15426981 -15427533 | chr19:15427146-15427165 | AUCUUUCGGGCCGUAGGAGG | + |
| 1488 | 58525 | WIZ | exon_12_c | chr19:15426981 -15427533 | chr19:15427143-15427162 | AACAUCUUUCGGGCCGUAGG | + |
| 1489 | 58525 | WIZ | exon_12_c | chr19:15426981 -15427533 | chr19:15427140-15427159 | GGGAACAUCUUUCGGGCCGU | + |
| 1490 | 58525 | WIZ | exon_12_c | chr19:15426981 -15427533 | chr19:15427140-15427159 | ACGGCCCGAAAGAUGUUCCC | - |
| 1491 | 58525 | WIZ | exon_12_c | chr19:15426981 -15427533 | chr19:15427029-15427048 | GGGGAACUGCACCCAUCUGA | - |
| 1492 | 58525 | WIZ | exon_12_c | chr19:15426981 -15427533 | chr19:15427019-15427038 | ACCCAUCUGAGGGUCCCUGG | - |
| 1493 | 58525 | WIZ | intron_12 | chr19:15425768 -15426981 | chr19:15426962-15426981 | GUAAGUGUGACCCUGCAGUA | - |
| 1494 | 58525 | WIZ | intron_12 | chr19:15425768 -15426981 | chr19:15426908-15426927 | GGAUACCCCCAAGGGGAGGC | + |
| 1495 | 58525 | WIZ | intron_12 | chr19:15425768 -15426981 | chr19:15426904-15426923 | CUCUGGAUACCCCCAAGGGG | + |
| 1496 | 58525 | WIZ | intron_12 | chr19:15425768 -15426981 | chr19:15426900-15426919 | GGCACUCUGGAUACCCCCAA | + |
| 1497 | 58525 | WIZ | intron_12 | chr19:15425768 -15426981 | chr19:15426899-15426918 | AGGCACUCUGGAUACCCCCA | + |
| 1498 | 58525 | WIZ | intron_12 | chr19:15425768 -15426981 | chr19:15426887-15426906 | CAAUUCAACCCUAGGCACUC | + |
| 1499 | 58525 | WIZ | intron_12 | chr19:15425768 -15426981 | chr19:15426899-15426918 | UGGGGGUAUCCAGAGUGCCU | - |
| 1500 | 58525 | WIZ | intron_12 | chr19:15425768 -15426981 | chr19:15426857-15426876 | CACGCAGGUAGAGAGGACAC | - |
| 1501 | 58525 | WIZ | intron_12 | chr19:15425768 -15426981 | chr19:15426856-15426875 | ACGCAGGUAGAGAGGACACA | - |
| 1502 | 58525 | WIZ | intron_12 | chr19:15425768 -15426981 | chr19:15426817-15426836 | GUUGCAGGGGUCUGCAUAGC | + |
| 1503 | 58525 | WIZ | intron_12 | chr19:15425768 -15426981 | chr19:15426803-15426822 | UGAGCAGCAGCUCAGUUGCA | + |
| 1504 | 58525 | WIZ | intron_12 | chr19:15425768 -15426981 | chr19:15426710-15426729 | CCACUACCAAUCGAUUGAAA | + |
| 1505 | 58525 | WIZ | intron_12 | chr19:15425768 -15426981 | chr19:15426680-15426699 | AGUCUUUCUCCCUAGGAGUC | + |
| 1506 | 58525 | WIZ | intron_12 | chr19:15425768 -15426981 | chr19:15426677-15426696 | UCCUAGGGAGAAAGACUGCG | - |
| 1507 | 58525 | WIZ | intron_12 | chr19:15425768 -15426981 | chr19:15426635-15426654 | UACAGCAGGAGCGUAGGGAC | - |
| 1508 | 58525 | WIZ | intron_12 | chr19:15425768 -15426981 | chr19:15426519-15426538 | GGUCACAUAAAGCUAGACUG | + |
| 1509 | 58525 | WIZ | intron_12 | chr19:15425768 -15426981 | chr19:15426336-15426355 | GAGCAGAAUGAACACAGUGC | + |
| 1510 | 58525 | WIZ | intron_12 | chr19:15425768 -15426981 | chr19:15426270-15426289 | GAGCGCUAAGGCACAAGCCU | + |
| 1511 | 58525 | WIZ | intron_12 | chr19:15425768 -15426981 | chr19:15426269-15426288 | UGAGCGCUAAGGCACAAGCC | + |
| 1512 | 58525 | WIZ | intron_12 | chr19:15425768 -15426981 | chr19:15426258-15426277 | CACAACACACGUGAGCGCUA | + |
| 1513 | 58525 | WIZ | intron_12 | chr19:15425768 -15426981 | chr19:15426221-15426240 | AUGGGAACAGCUCUCAGCAU | + |
| 1514 | 58525 | WIZ | intron_12 | chr19:15425768 -15426981 | chr19:15426220-15426239 | AAUGGGAACAGCUCUCAGCA | + |
| 1515 | 58525 | WIZ | intron_12 | chr19:15425768 -15426981 | chr19:15426202-15426221 | UACUUUGGGACGGUCUAAAA | + |
| 1516 | 58525 | WIZ | intron_12 | chr19:15425768 -15426981 | chr19:15426188-15426207 | CUACCUCCCAGUGUUACUUU | + |
| 1517 | 58525 | WIZ | intron_12 | chr19:15425768 -15426981 | chr19:15426187-15426206 | CCUACCUCCCAGUGUUACUU | + |
| 1518 | 58525 | WIZ | intron_12 | chr19:15425768 -15426981 | chr19:15426106-15426125 | GAUACCUCCCUGUAUGAUCC | + |
| 1519 | 58525 | WIZ | intron_12 | chr19:15425768 -15426981 | chr19:15426077-15426096 | CUGUCACUUCAAAUUCUAGC | + |
| 1520 | 58525 | WIZ | intron_12 | chr19:15425768 -15426981 | chr19:15426040-15426059 | CCAGAGGCCCUUUUAACAUC | + |
| 1521 | 58525 | WIZ | intron_12 | chr19:15425768 -15426981 | chr19:15426005-15426024 | AGCAGGUUGUUGCGGUCUGG | - |
| 1522 | 58525 | WIZ | intron_12 | chr19:15425768 -15426981 | chr19:15426004-15426023 | GCAGGUUGUUGCGGUCUGGU | - |
| 1523 | 58525 | WIZ | intron_12 | chr19:15425768 -15426981 | chr19:15425996-15426015 | UUGCGGUCUGGUGGGUGGUG | - |
| 1524 | 58525 | WIZ | intron_12 | chr19:15425768 -15426981 | chr19:15425961-15425980 | AGGCAGCUGGCACUGAUACG | - |
| 1525 | 58525 | WIZ | intron_12 | chr19:15425768 -15426981 | chr19:15425960-15425979 | GGCAGCUGGCACUGAUACGG | - |
| 1526 | 58525 | WIZ | intron_12 | chr19:15425768 -15426981 | chr19:15425948-15425967 | UGAUACGGGGGCUUUGAGCU | - |
| 1527 | 58525 | WIZ | intron_12 | chr19:15425768 -15426981 | chr19:15425945-15425964 | UACGGGGGCUUUGAGCUUGG | - |
| 1528 | 58525 | WIZ | intron_12 | chr19:15425768 -15426981 | chr19:15425767-15425786 | CGCUGCAGGGGAUCCAGGGU | + |
| 1529 | 58525 | WIZ | intron_12 | chr19:15425768 -15426981 | chr19:15425762-15425781 | CGGGACGCUGCAGGGGAUCC | + |
| 1530 | 58525 | WIZ | intron_12 | chr19:15425768 -15426981 | chr19:15425754-15425773 | GCUCUGCCCGGGACGCUGCA | + |
| 1531 | 58525 | WIZ | exon_13_c | chr19:15425240 -15425768 | chr19:15425732-15425751 | UCACAGCGGAUGUCGCGCAC | + |
| 1532 | 58525 | WIZ | exon_13_c | chr19:15425240 -15425768 | chr19:15425676-15425695 | GUGAGCGCGCGUGACUCGAC | + |
| 1533 | 58525 | WIZ | exon_13_c | chr19:15425240 -15425768 | chr19:15425652-15425671 | CGGUCACACCCAUCUGCCGC | + |
| 1534 | 58525 | WIZ | exon_13_c | chr19:15425240 -15425768 | chr19:15425567-15425586 | GGCUCCUUCUUGAUGAGGCA | + |
| 1535 | 58525 | WIZ | exon_13_c | chr19:15425240 -15425768 | chr19:15425561-15425580 | AUCAAGAAGGAGCCACCGGC | - |
| 1536 | 58525 | WIZ | exon_13_c | chr19:15425240 -15425768 | chr19:15425497-15425516 | CUGCACGGGCCCAGGGGCCA | + |
| 1537 | 58525 | WIZ | exon_13_c | chr19:15425240 -15425768 | chr19:15425465-15425484 | CGGCCAGCCAGGGGCGACAG | + |
| 1538 | 58525 | WIZ | exon_13_c | chr19:15425240 -15425768 | chr19:15425455-15425474 | UUUGCCUGGCCGGCCAGCCA | + |
| 1539 | 58525 | WIZ | exon_13_c | chr19:15425240 -15425768 | chr19:15425467-15425486 | CGCUGUCGCCCCUGGCUGGC | - |
| 1540 | 58525 | WIZ | exon_13_c | chr19:15425240 -15425768 | chr19:15425420-15425439 | AGCUCACGAGGAACCUGGGC | + |
| 1541 | 58525 | WIZ | exon_13_c | chr19:15425240 -15425768 | chr19:15425416-15425435 | GCUGAGCUCACGAGGAACCU | + |
| 1542 | 58525 | WIZ | exon_13_c | chr19:15425240 -15425768 | chr19:15425415-15425434 | GGCUGAGCUCACGAGGAACC | + |
| 1543 | 58525 | WIZ | exon_13_c | chr19:15425240 -15425768 | chr19:15425325-15425344 | GGAGGAGGCGGUCCUCCUGC | + |
| 1544 | 58525 | WIZ | exon_13_c | chr19:15425240 -15425768 | chr19:15425227-15425246 | CGCCCGCUGCUUACAGGAGU | + |
| 1545 | 58525 | WIZ | intron_13 | chr19:15425032 -15425240 | chr19:15425229-15425248 | CCACUCCUGUAAGCAGCGGG | - |
| 1546 | 58525 | WIZ | intron_13 | chr19:15425032 -15425240 | chr19:15425225-15425244 | UCCUGUAAGCAGCGGGCGGC | - |
| 1547 | 58525 | WIZ | intron_13 | chr19:15425032 -15425240 | chr19:15425224-15425243 | CCUGUAAGCAGCGGGCGGCA | - |
| 1548 | 58525 | WIZ | intron_13 | chr19:15425032 -15425240 | chr19:15425201-15425220 | UCCUGGGAGGGCGACCGCCA | - |
| 1549 | 58525 | WIZ | intron_13 | chr19:15425032 -15425240 | chr19:15425166-15425185 | UGCACGCUUGUGGCAUUGCC | + |
| 1550 | 58525 | WIZ | intron_13 | chr19:15425032 -15425240 | chr19:15425156-15425175 | GGGGUCAGUGUGCACGCUUG | + |
| 1551 | 58525 | WIZ | intron_13 | chr19:15425032 -15425240 | chr19:15425153-15425172 | GCGUGCACACUGACCCCAAG | - |
| 1552 | 58525 | WIZ | intron_13 | chr19:15425032 -15425240 | chr19:15425152-15425171 | CGUGCACACUGACCCCAAGU | - |
| 1553 | 58525 | WIZ | intron_13 | chr19:15425032 -15425240 | chr19:15425137-15425156 | AGCCAUGGGGGCCCCACUUG | + |
| 1554 | 58525 | WIZ | intron_13 | chr19:15425032 -15425240 | chr19:15425151-15425170 | GUGCACACUGACCCCAAGUG | - |
| 1555 | 58525 | WIZ | intron_13 | chr19:15425032 -15425240 | chr19:15425142-15425161 | GACCCCAAGUGGGGCCCCCA | - |
| 1556 | 58525 | WIZ | intron_13 | chr19:15425032 -15425240 | chr19:15425137-15425156 | CAAGUGGGGCCCCCAUGGCU | - |
| 1557 | 58525 | WIZ | intron_13 | chr19:15425032 -15425240 | chr19:15425103-15425122 | GGCGGGAUUGGCACCUGGCC | - |
| 1558 | 58525 | WIZ | intron_13 | chr19:15425032 -15425240 | chr19:15425071-15425090 | AGGGGGCAGGUGCACCCAGA | + |
| 1559 | 58525 | WIZ | intron_13 | chr19:15425032 -15425240 | chr19:15425058-15425077 | AGUCACAGCCCAAAGGGGGC | + |
| 1560 | 58525 | WIZ | intron_13 | chr19:15425032 -15425240 | chr19:15425069-15425088 | UGGGUGCACCUGCCCCCUUU | - |
| 1561 | 58525 | WIZ | intron_13 | chr19:15425032 -15425240 | chr19:15425054-15425073 | GCUGAGUCACAGCCCAAAGG | + |
| 1562 | 58525 | WIZ | intron_13 | chr19:15425032 -15425240 | chr19:15425053-15425072 | UGCUGAGUCACAGCCCAAAG | + |
| 1563 | 58525 | WIZ | intron_13 | chr19:15425032 -15425240 | chr19:15425052-15425071 | CUGCUGAGUCACAGCCCAAA | + |
| 1564 | 58525 | WIZ | exon_14_c | chr19:15424612 -15425032 | chr19:15424982-15425001 | CCUUGCGGUUUUCAAAGUAA | + |
| 1565 | 58525 | WIZ | exon_14_c | chr19:15424612 -15425032 | chr19:15424945-15424964 | CGGGCACACCUGCGGCAGUU | - |
| 1566 | 58525 | WIZ | exon_14_c | chr19:15424612 -15425032 | chr19:15424893-15424912 | CCAUCGAGACACUGAGCGAG | - |
| 1567 | 58525 | WIZ | exon_14_c | chr19:15424612 -15425032 | chr19:15424881-15424900 | UGAGCGAGUGGAUCAAACAC | - |
| 1568 | 58525 | WIZ | exon_14_c | chr19:15424612 -15425032 | chr19:15424844-15424863 | CGCCUACCGCAGCUACAUCC | - |
| 1569 | 58525 | WIZ | exon_14_c | chr19:15424612 -15425032 | chr19:15424843-15424862 | GCCUACCGCAGCUACAUCCA | - |
| 1570 | 58525 | WIZ | exon_14_c | chr19:15424612 -15425032 | chr19:15424814-15424833 | GGAACUUCUUGGUGAAGGGG | + |
| 1571 | 58525 | WIZ | exon_14_c | chr19:15424612 -15425032 | chr19:15424730-15424749 | CACUGCGGCCGACCACGGCC | + |
| 1572 | 58525 | WIZ | exon_14_c | chr19:15424612 -15425032 | chr19:15424725-15424744 | UCCGGCACUGCGGCCGACCA | + |
| 1573 | 58525 | WIZ | exon_14_c | chr19:15424612 -15425032 | chr19:15424729-15424748 | GCCGUGGUCGGCCGCAGUGC | - |
| 1574 | 58525 | WIZ | exon_14_c | chr19:15424612 -15425032 | chr19:15424726-15424745 | GUGGUCGGCCGCAGUGCCGG | - |
| 1575 | 58525 | WIZ | exon_14_c | chr19:15424612 -15425032 | chr19:15424725-15424744 | UGGUCGGCCGCAGUGCCGGA | - |
| 1576 | 58525 | WIZ | exon_14_c | chr19:15424612 -15425032 | chr19:15424724-15424743 | GGUCGGCCGCAGUGCCGGAG | - |
| 1577 | 58525 | WIZ | exon_14_c | chr19:15424612 -15425032 | chr19:15424707-15424726 | CUCGGGCCCUGGCUCCCCUC | + |
| 1578 | 58525 | WIZ | exon_14_c | chr19:15424612 -15425032 | chr19:15424679-15424698 | GCUCACCACCGUCGGCUGCC | + |
| 1579 | 58525 | WIZ | exon_14_c | chr19:15424612 -15425032 | chr19:15424671-15424690 | CAGAGGCCGCUCACCACCGU | + |
| 1580 | 58525 | WIZ | exon_14_c | chr19:15424612 -15425032 | chr19:15424673-15424692 | CGACGGUGGUGAGCGGCCUC | - |
| 1581 | 58525 | WIZ | exon_14_c | chr19:15424612 -15425032 | chr19:15424610-15424629 | CACUGUUGAUGUUCUGCCGC | + |
| 1582 | 58525 | WIZ | intron_14 | chr19:15424378 -15424612 | chr19:15424601-15424620 | CAUCAACAGUGAGUGCUUGG | - |
| 1583 | 58525 | WIZ | intron_14 | chr19:15424378 -15424612 | chr19:15424578-15424597 | AGGAGGGUCGGGAGCGCAGC | - |
| 1584 | 58525 | WIZ | intron_14 | chr19:15424378 -15424612 | chr19:15424533-15424552 | ACUCCCCAGGCGCUCUGCUG | - |
| 1585 | 58525 | WIZ | intron_14 | chr19:15424378 -15424612 | chr19:15424455-15424474 | ACUGAUGCUACCUGGAUGGG | + |
| 1586 | 58525 | WIZ | intron_14 | chr19:15424378 -15424612 | chr19:15424452-15424471 | AGGACUGAUGCUACCUGGAU | + |
| 1587 | 58525 | WIZ | intron_14 | chr19:15424378 -15424612 | chr19:15424451-15424470 | GAGGACUGAUGCUACCUGGA | + |
| 1588 | 58525 | WIZ | intron_14 | chr19:15424378 -15424612 | chr19:15424447-15424466 | AGCUGAGGACUGAUGCUACC | + |
| 1589 | 58525 | WIZ | intron_14 | chr19:15424378 -15424612 | chr19:15424432-15424451 | CUUGGAAUACACAAGAGCUG | + |
| 1590 | 58525 | WIZ | intron_14 | chr19:15424378 -15424612 | chr19:15424371-15424390 | UUCAAAUUCUAAGGUGGAGA | + |
| 1591 | 58525 | WIZ | intron_14 | chr19:15424378 -15424612 | chr19:15424362-15424381 | UUGUCGGCGUUCAAAUUCUA | + |
| 1592 | 58525 | WIZ | exon_15_c | chr19:15424182 -15424378 | chr19:15424338-15424357 | UGCGGAGGCAUCUGGAGGGC | + |
| 1593 | 58525 | WIZ | exon_15_c | chr19:15424182 -15424378 | chr19:15424257-15424276 | GACUGGCCGGACUCGGGGUG | + |
| 1594 | 58525 | WIZ | exon_15_c | chr19:15424182 -15424378 | chr19:15424256-15424275 | GGACUGGCCGGACUCGGGGU | + |
| 1595 | 58525 | WIZ | exon_15_c | chr19:15424182 -15424378 | chr19:15424252-15424271 | GAGGGGACUGGCCGGACUCG | + |
| 1596 | 58525 | WIZ | exon_15_c | chr19:15424182 -15424378 | chr19:15424222-15424241 | AGUGAUGUCUGGGGGGGCCG | + |
| 1597 | 58525 | WIZ | exon_15_c | chr19:15424182 -15424378 | chr19:15424221-15424240 | AAGUGAUGUCUGGGGGGGCC | + |
| 1598 | 58525 | WIZ | exon_15_c | chr19:15424182 -15424378 | chr19:15424220-15424239 | CAAGUGAUGUCUGGGGGGGC | + |
| 1599 | 58525 | WIZ | exon_15_c | chr19:15424182 -15424378 | chr19:15424214-15424233 | ACUUGACAAGUGAUGUCUGG | + |
| 1600 | 58525 | WIZ | exon_15_c | chr19:15424182 -15424378 | chr19:15424211-15424230 | CGAACUUGACAAGUGAUGUC | + |
| 1601 | 58525 | WIZ | exon_15_c | chr19:15424182 -15424378 | chr19:15424172-15424191 | GGGCAGCCUACCUGCAUUUG | + |
| 1602 | 58525 | WIZ | exon_15_c | chr19:15424182 -15424378 | chr19:15424185-15424204 | ACAUCUACACCCUCAAAUGC | - |
| 1603 | 58525 | WIZ | exon_15_c | chr19:15424182 -15424378 | chr19:15424181-15424200 | CUACACCCUCAAAUGCAGGU | - |
| 1604 | 58525 | WIZ | intron_15 | chr19:15423235 -15424182 | chr19:15424171-15424190 | AAAUGCAGGUAGGCUGCCCC | - |
| 1605 | 58525 | WIZ | intron_15 | chr19:15423235 -15424182 | chr19:15424169-15424188 | AUGCAGGUAGGCUGCCCCUG | - |
| 1606 | 58525 | WIZ | intron_15 | chr19:15423235 -15424182 | chr19:15424131-15424150 | GUGACCAAGGUCCACUCAGG | + |
| 1607 | 58525 | WIZ | intron_15 | chr19:15423235 -15424182 | chr19:15424128-15424147 | CGGGUGACCAAGGUCCACUC | + |
| 1608 | 58525 | WIZ | intron_15 | chr19:15423235 -15424182 | chr19:15424118-15424137 | UCCAAGGCUCCGGGUGACCA | + |
| 1609 | 58525 | WIZ | intron_15 | chr19:15423235 -15424182 | chr19:15424109-15424128 | CUAUCCUGUUCCAAGGCUCC | + |
| 1610 | 58525 | WIZ | intron_15 | chr19:15423235 -15424182 | chr19:15424108-15424127 | CCUAUCCUGUUCCAAGGCUC | + |
| 1611 | 58525 | WIZ | intron_15 | chr19:15423235 -15424182 | chr19:15424116-15424135 | GUCACCCGGAGCCUUGGAAC | - |
| 1612 | 58525 | WIZ | intron_15 | chr19:15423235 -15424182 | chr19:15424111-15424130 | CCGGAGCCUUGGAACAGGAU | - |
| 1613 | 58525 | WIZ | intron_15 | chr19:15423235 -15424182 | chr19:15424110-15424129 | CGGAGCCUUGGAACAGGAUA | - |
| 1614 | 58525 | WIZ | intron_15 | chr19:15423235 -15424182 | chr19:15424105-15424124 | CCUUGGAACAGGAUAGGGUU | - |
| 1615 | 58525 | WIZ | intron_15 | chr19:15423235 -15424182 | chr19:15424102-15424121 | UGGAACAGGAUAGGGUUUGG | - |
| 1616 | 58525 | WIZ | intron_15 | chr19:15423235 -15424182 | chr19:15423874-15423893 | CUCCUCGUAACAAAUCUGUA | + |
| 1617 | 58525 | WIZ | intron_15 | chr19:15423235 -15424182 | chr19:15423737-15423756 | GCUGCUCUUCAAUGUACUUG | + |
| 1618 | 58525 | WIZ | intron_15 | chr19:15423235 -15424182 | chr19:15423683-15423702 | GACUUGGCCUGUAUGGCCUC | + |
| 1619 | 58525 | WIZ | intron_15 | chr19:15423235 -15424182 | chr19:15423676-15423695 | GACUUCUGACUUGGCCUGUA | + |
| 1620 | 58525 | WIZ | intron_15 | chr19:15423235 -15424182 | chr19:15423568-15423587 | GGUGGGGGGCUUGGUGCGUU | - |
| 1621 | 58525 | WIZ | intron_15 | chr19:15423235 -15424182 | chr19:15423564-15423583 | GGGGGCUUGGUGCGUUGGGU | - |
| 1622 | 58525 | WIZ | intron_15 | chr19:15423235 -15424182 | chr19:15423522-15423541 | CAUAGAAUCUGAGACAGUAG | + |
| 1623 | 58525 | WIZ | intron_15 | chr19:15423235 -15424182 | chr19:15423507-15423526 | CUAUGUAUCUGCCAGAUGGC | - |
| 1624 | 58525 | WIZ | intron_15 | chr19:15423235 -15424182 | chr19:15423493-15423512 | UUCCAGGUACCCCUGCCAUC | + |
| 1625 | 58525 | WIZ | intron_15 | chr19:15423235 -15424182 | chr19:15423469-15423488 | UGGUGCCAGGUAAGGGCUAC | + |
| 1626 | 58525 | WIZ | intron_15 | chr19:15423235 -15424182 | chr19:15423461-15423480 | GAAGUCACUGGUGCCAGGUA | + |
| 1627 | 58525 | WIZ | intron_15 | chr19:15423235 -15424182 | chr19:15423404-15423423 | CUCCACUCACCAUGGGGUCA | + |
| 1628 | 58525 | WIZ | intron_15 | chr19:15423235 -15424182 | chr19:15423393-15423412 | UGAGUGGAGGUGGCUGUCCA | - |
| 1629 | 58525 | WIZ | intron_15 | chr19:15423235 -15424182 | chr19:15423373-15423392 | CAGAAGUCAGGCGUUUCCCA | + |
| 1630 | 58525 | WIZ | intron_15 | chr19:15423235 -15424182 | chr19:15423375-15423394 | CAUGGGAAACGCCUGACUUC | - |
| 1631 | 58525 | WIZ | intron_15 | chr19:15423235 -15424182 | chr19:15423374-15423393 | AUGGGAAACGCCUGACUUCU | - |
| 1632 | 58525 | WIZ | exon_16_c | chr19:15423075 -15423235 | chr19:15423190-15423209 | CCCUCUCCAUCCAGGAAGAG | - |
| 1633 | 58525 | WIZ | exon_16_c | chr19:15423075 -15423235 | chr19:15423126-15423145 | CAAAGCGGACCCCCCACCUG | - |
| 1634 | 58525 | WIZ | exon_16_c | chr19:15423075 -15423235 | chr19:15423117-15423136 | CCCCCCACCUGAGGAGUCCC | - |
| 1635 | 58525 | WIZ | exon_16_c | chr19:15423075 -15423235 | chr19:15423091-15423110 | CGCCGCUGUCUGUGCCUGCG | + |
| 1636 | 58525 | WIZ | exon_16_n c.1 | chr19:15422090 -15423075 | chr19:15422942-15422961 | CCCCAAGGGGCGCCGGUUUG | + |
| 1637 | 58525 | WIZ | exon_16_n c.1 | chr19:15422090 -15423075 | chr19:15422947-15422966 | AACCUCAAACCGGCGCCCCU | - |
| 1638 | 58525 | WIZ | exon_16_n c.1 | chr19:15422090 -15423075 | chr19:15422945-15422964 | CCUCAAACCGGCGCCCCUUG | - |
| 1639 | 58525 | WIZ | exon_16_n c.1 | chr19:15422090 -15423075 | chr19:15422944-15422963 | CUCAAACCGGCGCCCCUUGG | - |
| 1640 | 58525 | WIZ | exon_16_n c.1 | chr19:15422090 -15423075 | chr19:15422940-15422959 | AACCGGCGCCCCUUGGGGGC | - |
| 1641 | 58525 | WIZ | exon_16_n c.1 | chr19:15422090 -15423075 | chr19:15422939-15422958 | ACCGGCGCCCCUUGGGGGCC | - |
| 1642 | 58525 | WIZ | exon_16_n c.1 | chr19:15422090 -15423075 | chr19:15422918-15422937 | CGCCCUGGCUGUAGUGUGCC | + |
| 1643 | 58525 | WIZ | exon_16_n c.1 | chr19:15422090 -15423075 | chr19:15422875-15422894 | CCCCCAGCCCGAGGACUCUG | - |
| 1644 | 58525 | WIZ | exon_16_n c.1 | chr19:15422090 -15423075 | chr19:15422868-15422887 | CCCGAGGACUCUGGGGCCAC | - |
| 1645 | 58525 | WIZ | exon_16_n c.1 | chr19:15422090 -15423075 | chr19:15422867-15422886 | CCGAGGACUCUGGGGCCACA | - |
| 1646 | 58525 | WIZ | exon_16_n c.1 | chr19:15422090 -15423075 | chr19:15422796-15422815 | ACCGGCUGCCAUCAGAGACC | + |
| 1647 | 58525 | WIZ | exon_16_n c.1 | chr19:15422090 -15423075 | chr19:15422712-15422731 | GGGGUCUUUGCAAAUGGCCA | + |
| 1648 | 58525 | WIZ | exon_16_n c.1 | chr19:15422090 -15423075 | chr19:15422568-15422587 | UGAACGACCACAUCAUGCCA | - |
| 1649 | 58525 | WIZ | exon_16_n c.1 | chr19:15422090 -15423075 | chr19:15422427-15422446 | AGCUCUGAGCUCUUCCCAGC | + |
| 1650 | 58525 | WIZ | exon_16_n c.1 | chr19:15422090 -15423075 | chr19:15422393-15422412 | UUGGGGGGCCUUGACAUGGC | + |
| 1651 | 58525 | WIZ | exon_16_n c.1 | chr19:15422090 -15423075 | chr19:15422389-15422408 | CUCUUUGGGGGGCCUUGACA | + |
| 1652 | 58525 | WIZ | exon_16_n c.1 | chr19:15422090 -15423075 | chr19:15422378-15422397 | AGCCCCUGAGGCUCUUUGGG | + |
| 1653 | 58525 | WIZ | exon_16_n c.1 | chr19:15422090 -15423075 | chr19:15422376-15422395 | AGAGCCCCUGAGGCUCUUUG | + |
| 1654 | 58525 | WIZ | exon_16_n c.1 | chr19:15422090 -15423075 | chr19:15422374-15422393 | CCAGAGCCCCUGAGGCUCUU | + |
| 1655 | 58525 | WIZ | exon_16_n c.1 | chr19:15422090 -15423075 | chr19:15422383-15422402 | GGCCCCCCAAAGAGCCUCAG | - |
| 1656 | 58525 | WIZ | exon_16_n c.1 | chr19:15422090 -15423075 | chr19:15422240-15422259 | CGCGUUUUGUGUAGAGAAUA | - |
| 1657 | 58525 | WIZ | exon_16_n c.2 | chr19:15422086 -15422090 | chr19:15422071-15422090 | CACGCUGGCCGCCUGCCCCA | + |
| 1658 | 58525 | WIZ | exon_16_n c.2 | chr19:15422086 -15422090 | chr19:15422085-15422104 | UUCUGGAAACACCCUGGGGC | - |
| 1659 | 58525 | WIZ | exon_16_n c.3 | chr19:15421507 -15422086 | chr19:15422056-15422075 | GCGUGUGUUUUUCUGUCAAG | - |
| 1660 | 58525 | WIZ | exon_16_n c.3 | chr19:15421507 -15422086 | chr19:15422051-15422070 | UGUUUUUCUGUCAAGUGGAC | - |
| 1661 | 58525 | WIZ | exon_16_n c.3 | chr19:15421507 -15422086 | chr19:15422023-15422042 | AUUGGCUGGCAGCCGGGGCU | - |
| 1662 | 58525 | WIZ | exon_16_n c.3 | chr19:15421507 -15422086 | chr19:15421990-15422009 | CAUGGCGCUCUGGACAGAGG | + |
| 1663 | 58525 | WIZ | exon_16_n c.3 | chr19:15421507 -15422086 | chr19:15421987-15422006 | CUCCAUGGCGCUCUGGACAG | + |
| 1664 | 58525 | WIZ | exon_16_n c.3 | chr19:15421507 -15422086 | chr19:15421989-15422008 | CUCUGUCCAGAGCGCCAUGG | - |
| 1665 | 58525 | WIZ | exon_16_n c.3 | chr19:15421507 -15422086 | chr19:15421963-15421982 | GCGGCCAACUGGAAAACCCA | + |
| 1666 | 58525 | WIZ | exon_16_n c.3 | chr19:15421507 -15422086 | chr19:15421962-15421981 | GGCGGCCAACUGGAAAACCC | + |
| 1667 | 58525 | WIZ | exon_16_n c.3 | chr19:15421507 -15422086 | chr19:15421970-15421989 | GAGGCCCUGGGUUUUCCAGU | - |
| 1668 | 58525 | WIZ | exon_16_n c.3 | chr19:15421507 -15422086 | chr19:15421952-15421971 | UGGUCGGCUUGGCGGCCAAC | + |
| 1669 | 58525 | WIZ | exon_16_n c.3 | chr19:15421507 -15422086 | chr19:15421944-15421963 | GCUGCGUCUGGUCGGCUUGG | + |
| 1670 | 58525 | WIZ | exon_16_n c.3 | chr19:15421507 -15422086 | chr19:15421941-15421960 | CCAGCUGCGUCUGGUCGGCU | + |
| 1671 | 58525 | WIZ | exon_16_n c.3 | chr19:15421507 -15422086 | chr19:15421936-15421955 | CAUCCCCAGCUGCGUCUGGU | + |
| 1672 | 58525 | WIZ | exon_16_n c.3 | chr19:15421507 -15422086 | chr19:15421944-15421963 | CCAAGCCGACCAGACGCAGC | - |
| 1673 | 58525 | WIZ | exon_16_n c.3 | chr19:15421507 -15422086 | chr19:15421943-15421962 | CAAGCCGACCAGACGCAGCU | - |
| 1674 | 58525 | WIZ | exon_16_n c.3 | chr19:15421507 -15422086 | chr19:15421942-15421961 | AAGCCGACCAGACGCAGCUG | - |
| 1675 | 58525 | WIZ | exon_16_n c.3 | chr19:15421507 -15422086 | chr19:15421910-15421929 | AGAGCCAACAGCUGGGAACU | + |
| 1676 | 58525 | WIZ | exon_16_n c.3 | chr19:15421507 -15422086 | chr19:15421903-15421922 | GGCCUAAAGAGCCAACAGCU | + |
| 1677 | 58525 | WIZ | exon_16_n c.3 | chr19:15421507 -15422086 | chr19:15421902-15421921 | GCUGUUGGCUCUUUAGGCCA | - |
| 1678 | 58525 | WIZ | exon_16_n c.3 | chr19:15421507 -15422086 | chr19:15421894-15421913 | CUCUUUAGGCCAUGGCUGGG | - |
| 1679 | 58525 | WIZ | exon_16_n c.3 | chr19:15421507 -15422086 | chr19:15421840-15421859 | ACCCUGGUUCAUCUGCUCAC | + |
| 1680 | 58525 | WIZ | exon_16_n c.3 | chr19:15421507 -15422086 | chr19:15421824-15421843 | GGGUUCUGGGCAGCCUGUCU | - |
| 1681 | 58525 | WIZ | exon_16_n c.3 | chr19:15421507 -15422086 | chr19:15421791-15421810 | CCUCAACUGCUUCUUGAUCC | + |
| 1682 | 58525 | WIZ | exon_16_n c.3 | chr19:15421507 -15422086 | chr19:15421794-15421813 | CCAGGAUCAAGAAGCAGUUG | - |
| 1683 | 58525 | WIZ | exon_16_n c.3 | chr19:15421507 -15422086 | chr19:15421774-15421793 | AGGCUAGAGGAGCUUAUCAA | - |
| 1684 | 58525 | WIZ | exon_16_n c.3 | chr19:15421507 -15422086 | chr19:15421770-15421789 | UAGAGGAGCUUAUCAAAGGC | - |
| 1685 | 58525 | WIZ | exon_16_n c.3 | chr19:15421507 -15422086 | chr19:15421756-15421775 | AAAGGCAGGAGCUACCAGCG | - |
| 1686 | 58525 | WIZ | exon_16_n c.3 | chr19:15421507 -15422086 | chr19:15421755-15421774 | AAGGCAGGAGCUACCAGCGA | - |
| 1687 | 58525 | WIZ | exon_16_n c.3 | chr19:15421507 -15422086 | chr19:15421748-15421767 | GAGCUACCAGCGAGGGUGUC | - |
| 1688 | 58525 | WIZ | exon_16_n c.3 | chr19:15421507 -15422086 | chr19:15421738-15421757 | CGAGGGUGUCAGGGACCCGU | - |
| 1689 | 58525 | WIZ | exon_16_n c.3 | chr19:15421507 -15422086 | chr19:15421737-15421756 | GAGGGUGUCAGGGACCCGUU | - |
| 1690 | 58525 | WIZ | exon_16_n c.3 | chr19:15421507 -15422086 | chr19:15421728-15421747 | AGGGACCCGUUGGGAGCAUU | - |
| 1691 | 58525 | WIZ | exon_16_n c.3 | chr19:15421507 -15422086 | chr19:15421727-15421746 | GGGACCCGUUGGGAGCAUUU | - |
| 1692 | 58525 | WIZ | exon_16_n c.3 | chr19:15421507 -15422086 | chr19:15421724-15421743 | ACCCGUUGGGAGCAUUUGGG | - |
| 1693 | 58525 | WIZ | exon_16_n c.3 | chr19:15421507 -15422086 | chr19:15421723-15421742 | CCCGUUGGGAGCAUUUGGGU | - |
| 1694 | 58525 | WIZ | exon_16_n c.3 | chr19:15421507 -15422086 | chr19:15421722-15421741 | CCGUUGGGAGCAUUUGGGUG | - |
| 1695 | 58525 | WIZ | exon_16_n c.3 | chr19:15421507 -15422086 | chr19:15421698-15421717 | CCAGUGGGGUUGUAGAGAGC | - |
| 1696 | 58525 | WIZ | exon_16_n c.3 | chr19:15421507 -15422086 | chr19:15421626-15421645 | CCGCAUGUUCCUUGGGUCAG | + |
| 1697 | 58525 | WIZ | exon_16_n c.3 | chr19:15421507 -15422086 | chr19:15421619-15421638 | CUUUUCCCCGCAUGUUCCUU | + |
| 1698 | 58525 | WIZ | exon_16_n c.3 | chr19:15421507 -15422086 | chr19:15421618-15421637 | UCUUUUCCCCGCAUGUUCCU | + |
| 1699 | 58525 | WIZ | exon_16_n c.3 | chr19:15421507 -15422086 | chr19:15421629-15421648 | CCCCUGACCCAAGGAACAUG | - |
| 1700 | 58525 | WIZ | exon_16_n c.3 | chr19:15421507 -15422086 | chr19:15421619-15421638 | AAGGAACAUGCGGGGAAAAG | - |
| 1701 | 58525 | WIZ | exon_16_n c.3 | chr19:15421507 -15422086 | chr19:15421591-15421610 | UAACAUCGCAAAGGAGCCAG | + |
| 1702 | 58525 | WIZ | exon_16_n c.3 | chr19:15421507 -15422086 | chr19:15421505-15421524 | UCCUUCUUGUUUAUUGCAUG | - |
| 1703 | 58525 | WIZ | exon_16_n c.5 | chr19:15419979 -15421506 | chr19:15421476-15421495 | AGCUCAUCGUUUUUACUAAA | - |
| 1704 | 58525 | WIZ | exon_16_n c.5 | chr19:15419979 -15421506 | chr19:15421465-15421484 | UUUACUAAACGGUCAAGUGC | - |
| 1705 | 58525 | WIZ | exon_16_n c.5 | chr19:15419979 -15421506 | chr19:15421444-15421463 | GGAGAGUGGGAACGACCUCA | - |
| 1706 | 58525 | WIZ | exon_16_n c.5 | chr19:15419979 -15421506 | chr19:15421426-15421445 | CCUUCUGUCCACACGCCAUG | + |
| 1707 | 58525 | WIZ | exon_16_n c.5 | chr19:15419979 -15421506 | chr19:15421437-15421456 | GGGAACGACCUCAUGGCGUG | - |
| 1708 | 58525 | WIZ | exon_16_n c.5 | chr19:15419979 -15421506 | chr19:15421427-15421446 | UCAUGGCGUGUGGACAGAAG | - |
| 1709 | 58525 | WIZ | exon_16_n c.5 | chr19:15419979 -15421506 | chr19:15421367-15421386 | UUCCCAGGAAGGGGUAUGGU | + |
| 1710 | 58525 | WIZ | exon_16_n c.5 | chr19:15419979 -15421506 | chr19:15421335-15421354 | AGGCUGCAAUAACGCCCACA | - |
| 1711 | 58525 | WIZ | exon_16_n c.5 | chr19:15419979 -15421506 | chr19:15421334-15421353 | GGCUGCAAUAACGCCCACAA | - |
| 1712 | 58525 | WIZ | exon_16_n c.5 | chr19:15419979 -15421506 | chr19:15421318-15421337 | UGGGCCAAGACCACCCUUGU | + |
| 1713 | 58525 | WIZ | exon_16_n c.5 | chr19:15419979 -15421506 | chr19:15421317-15421336 | GUGGGCCAAGACCACCCUUG | + |
| 1714 | 58525 | WIZ | exon_16_n c.5 | chr19:15419979 -15421506 | chr19:15421325-15421344 | AACGCCCACAAGGGUGGUCU | - |
| 1715 | 58525 | WIZ | exon_16_n c.5 | chr19:15419979 -15421506 | chr19:15421299-15421318 | CCCCACAGGAGCAGACGUGU | + |
| 1716 | 58525 | WIZ | exon_16_n c.5 | chr19:15419979 -15421506 | chr19:15421302-15421321 | CCCACACGUCUGCUCCUGUG | - |
| 1717 | 58525 | WIZ | exon_16_n c.5 | chr19:15419979 -15421506 | chr19:15421285-15421304 | GAUGUGCGUCCUGACCCCAC | + |
| 1718 | 58525 | WIZ | exon_16_n c.5 | chr19:15419979 -15421506 | chr19:15421297-15421316 | ACGUCUGCUCCUGUGGGGUC | - |
| 1719 | 58525 | WIZ | exon_16_n c.5 | chr19:15419979 -15421506 | chr19:15421280-15421299 | GUCAGGACGCACAUCUCGCC | - |
| 1720 | 58525 | WIZ | exon_16_n c.5 | chr19:15419979 -15421506 | chr19:15421277-15421296 | AGGACGCACAUCUCGCCUGG | - |
| 1721 | 58525 | WIZ | exon_16_n c.5 | chr19:15419979 -15421506 | chr19:15421259-15421278 | GGUUGCGGCCUUCUGCCACC | + |
| 1722 | 58525 | WIZ | exon_16_n c.5 | chr19:15419979 -15421506 | chr19:15421270-15421289 | ACAUCUCGCCUGGUGGCAGA | - |
| 1723 | 58525 | WIZ | exon_16_n c.5 | chr19:15419979 -15421506 | chr19:15421205-15421224 | GUAUCCAGGACUUAGGAAGC | - |
| 1724 | 58525 | WIZ | exon_16_n c.5 | chr19:15419979 -15421506 | chr19:15421204-15421223 | UAUCCAGGACUUAGGAAGCA | - |
| 1725 | 58525 | WIZ | exon_16_n c.5 | chr19:15419979 -15421506 | chr19:15421177-15421196 | CAUCUUGUGAGCUGACUCAA | - |
| 1726 | 58525 | WIZ | exon_16_n c.5 | chr19:15419979 -15421506 | chr19:15420725-15420744 | UCACUGCAUGAUUGGUGGGG | + |
| 1727 | 58525 | WIZ | exon_16_n c.5 | chr19:15419979 -15421506 | chr19:15420722-15420741 | ACUUCACUGCAUGAUUGGUG | + |
| 1728 | 58525 | WIZ | exon_16_n c.5 | chr19:15419979 -15421506 | chr19:15420721-15420740 | CACUUCACUGCAUGAUUGGU | + |
| 1729 | 58525 | WIZ | exon_16_n c.5 | chr19:15419979 -15421506 | chr19:15420720-15420739 | UCACUUCACUGCAUGAUUGG | + |
| 1730 | 58525 | WIZ | exon_16_n c.5 | chr19:15419979 -15421506 | chr19:15420721-15420740 | ACCAAUCAUGCAGUGAAGUG | - |
| 1731 | 58525 | WIZ | exon_16_n c.5 | chr19:15419979 -15421506 | chr19:15420720-15420739 | CCAAUCAUGCAGUGAAGUGA | - |
| 1732 | 58525 | WIZ | exon_16_n c.5 | chr19:15419979 -15421506 | chr19:15420704-15420723 | GUGAGGGUCAUGUGUGUCCU | - |
| 1733 | 58525 | WIZ | exon_16_n c.5 | chr19:15419979 -15421506 | chr19:15420677-15420696 | GUCACCUCCAGUUCUUGCAG | - |
| 1734 | 58525 | WIZ | exon_16_n c.5 | chr19:15419979 -15421506 | chr19:15420643-15420662 | AGCAAUGCUCAGAAAGUUUU | + |
| 1735 | 58525 | WIZ | exon_16_n c.5 | chr19:15419979 -15421506 | chr19:15420606-15420625 | CUGCCUGAGGUGUAUUGAAG | + |
| 1736 | 58525 | WIZ | exon_16_n c.5 | chr19:15419979 -15421506 | chr19:15420584-15420603 | AAGUCUCAGCUUUUGAGCCG | - |
| 1737 | 58525 | WIZ | exon_16_n c.5 | chr19:15419979 -15421506 | chr19:15420575-15420594 | CUUUUGAGCCGUGGUCUCUG | - |
| 1738 | 58525 | WIZ | exon_16_n c.5 | chr19:15419979 -15421506 | chr19:15420574-15420593 | UUUUGAGCCGUGGUCUCUGA | - |
| 1739 | 58525 | WIZ | exon_16_n c.5 | chr19:15419979 -15421506 | chr19:15420530-15420549 | AAUCGGUACAAUGAUGACUG | - |
| 1740 | 58525 | WIZ | exon_16_n c.5 | chr19:15419979 -15421506 | chr19:15420501-15420520 | CGAUGAAGGAACGAACCUGC | - |
| 1741 | 58525 | WIZ | exon_16_n c.5 | chr19:15419979 -15421506 | chr19:15420500-15420519 | GAUGAAGGAACGAACCUGCA | - |
| 1742 | 58525 | WIZ | exon_16_n c.5 | chr19:15419979 -15421506 | chr19:15420483-15420502 | ACACGUCUUCUGCGCCCUGC | + |
| 1743 | 58525 | WIZ | exon_16_n c.5 | chr19:15419979 -15421506 | chr19:15420481-15420500 | AGGGCGCAGAAGACGUGUCC | - |
| 1744 | 58525 | WIZ | exon_16_n c.5 | chr19:15419979 -15421506 | chr19:15420479-15420498 | GGCGCAGAAGACGUGUCCUG | - |
| 1745 | 58525 | WIZ | exon_16_n c.5 | chr19:15419979 -15421506 | chr19:15420452-15420471 | CCUGUCUUCCAAACCAAGGC | + |
| 1746 | 58525 | WIZ | exon_16_n c.5 | chr19:15419979 -15421506 | chr19:15420398-15420417 | GGAUAAGCACUCUGGCUUCG | + |
| 1747 | 58525 | WIZ | exon_16_n c.5 | chr19:15419979 -15421506 | chr19:15420397-15420416 | CGGAUAAGCACUCUGGCUUC | + |
| 1748 | 58525 | WIZ | exon_16_n c.5 | chr19:15419979 -15421506 | chr19:15420396-15420415 | ACGGAUAAGCACUCUGGCUU | + |
| 1749 | 58525 | WIZ | exon_16_n c.5 | chr19:15419979 -15421506 | chr19:15420390-15420409 | GAUCUGACGGAUAAGCACUC | + |
| 1750 | 58525 | WIZ | exon_16_n c.5 | chr19:15419979 -15421506 | chr19:15420377-15420396 | UCAGAUCUCUGCUUCAUGUU | - |
| 1751 | 58525 | WIZ | exon_16_n c.5 | chr19:15419979 -15421506 | chr19:15420333-15420352 | AGAAGUGGCUUUGUUCCGUA | - |
| 1752 | 58525 | WIZ | exon_16_n c.5 | chr19:15419979 -15421506 | chr19:15420315-15420334 | CUGCAGAACUUGCUGCCAUA | + |
| 1753 | 58525 | WIZ | exon_16_n c.5 | chr19:15419979 -15421506 | chr19:15420289-15420308 | AAACUCCCCCCACCCAAAUG | + |
| 1754 | 58525 | WIZ | exon_16_n c.5 | chr19:15419979 -15421506 | chr19:15420239-15420258 | UUGCUCUACUUUUGUAUAGU | + |
| 1755 | 58525 | WIZ | exon_16_n c.5 | chr19:15419979 -15421506 | chr19:15420186-15420205 | UGAAGACAUUGGUCAUGGGU | + |
| 1756 | 58525 | WIZ | exon_16_n c.5 | chr19:15419979 -15421506 | chr19:15420182-15420201 | CAGCUGAAGACAUUGGUCAU | + |
| 1757 | 58525 | WIZ | exon_16_n c.5 | chr19:15419979 -15421506 | chr19:15420175-15420194 | UCUCUGACAGCUGAAGACAU | + |
| 1758 | 58525 | WIZ | exon_16_n c.5 | chr19:15419979 -15421506 | chr19:15420114-15420133 | GUGCUUCACACAAUUCAGAC | + |
| 1759 | 58525 | WIZ | exon_16_n c.5 | chr19:15419979 -15421506 | chr19:15420089-15420108 | AGUUAACUGAUCUUAUGGCC | + |
| 1760 | 58525 | WIZ | exon_16_n c.5 | chr19:15419979 -15421506 | chr19:15420027-15420046 | GAUUUCUUUAGGUGUAAUAG | + |

TABLE 2

| SEQ ID NO | target_gene-id | target_symb ol | target region_name | target_region_coordinates | gRNA_target site_coordinates | gRNA Targeting Domain | strand |
|---|---|---|---|---|---|---|---|
| 1761 | 58525 | WIZ | promoter | chrl9:15449951-15451624 | chr19: 15451586-15451605 | ACUAAGAAUUGCCAAUUCUU | - |
| 1762 | 58525 | WIZ | promoter | chrl9:15449951-15451624 | chr19:15451572-15451591 | CGGGGCAAAUGCCUAAGAAU | + |
| 1763 | 58525 | WIZ | promoter | chrl9:15449951-15451624 | chr19: 15451552-15451571 | GGAGAGAUGAAUAGGGCUUG | + |
| 1764 | 58525 | WIZ | promoter | chrl9:15449951-15451624 | chr19:15451544-15451563 | AGAAUUUGGGAGAGAUGAAU | + |
| 1765 | 58525 | WIZ | promoter | chrl9:15449951-15451624 | chr19: 15451530-15451549 | CUUCUAAUUAGGGGAGAAUU | + |
| 1766 | 58525 | WIZ | promoter | chrl9:15449951-15451624 | chr19: 15451525-15451544 | UCCCCUAAUUAGAAGUCUCA | - |
| 1767 | 58525 | WIZ | promoter | chrl9:15449951-15451624 | chr19: 15451455-15451474 | ACGGGCUCUUAAGAGAAUGA | + |
| 1768 | 58525 | WIZ | promoter | chrl9:15449951-15451624 | chr19:15451351-15451370 | GCAGGUGCUGCCUAUAACAA | + |
| 1769 | 58525 | WIZ | promoter | chrl9:15449951-15451624 | chr19: 15451333-15451352 | UCCAUGCUUCAUUGAGAAGC | + |
| 1770 | 58525 | WIZ | promoter | chrl9:15449951-15451624 | chr19:15451337-15451356 | ACCUGCUUCUCAAUGAAGCA | - |
| 1771 | 58525 | WIZ | promoter | chrl9:15449951-15451624 | chr19: 15451324-15451343 | UGAAGCAUGGAUUCCACCCC | - |
| 1772 | 58525 | WIZ | promoter | chrl9:15449951-15451624 | chr19:15451305-15451324 | UGGGAUUGGGAGGUUGCCAG | + |
| 1773 | 58525 | WIZ | promoter | chrl9:15449951-15451624 | chr19:15451304-15451323 | GUGGGAUUGGGAGGUUGCCA | + |
| 1774 | 58525 | WIZ | promoter | chrl9:15449951-15451624 | chr19:15451295-15451314 | GCUCUCACUGUGGGAUUGGG | + |
| 1775 | 58525 | WIZ | promoter | chrl9:15449951-15451624 | chr19:15451292-15451311 | GAUGCUCUCACUGUGGGAUU | + |
| 1776 | 58525 | WIZ | promoter | chrl9:15449951-15451624 | chr19: 15451286-15451305 | UAGGAAGAUGCUCUCACUGU | + |
| 1777 | 58525 | WIZ | promoter | chrl9:15449951-15451624 | chr19: 15451287-15451306 | CACAGUGAGAGCAUCUUCCU | - |
| 1778 | 58525 | WIZ | promoter | chrl9:15449951-15451624 | chr19:15451260-15451279 | AUGGCCUCCGUGACAUGAGG | + |
| 1779 | 58525 | WIZ | promoter | chrl9:15449951-15451624 | chr19:15451257-15451276 | CCCAUGGCCUCCGUGACAUG | + |
| 1780 | 58525 | WIZ | promoter | chrl9:15449951-15451624 | chr19: 15451255-15451274 | UGUCACGGAGGCCAUGGGUC | - |
| 1781 | 58525 | WIZ | promoter | chrl9:15449951-15451624 | chr19:15451241-15451260 | UUAUCCGCCUCCCA GACCCA | + |
| 1782 | 58525 | WIZ | promoter | chrl9:15449951-15451624 | chr19: 15451254-15451273 | GUCACGGAGGCCAUGGGUCU | - |
| 1783 | 58525 | WIZ | promoter | chrl9:15449951-15451624 | chr19:15451241-15451260 | UGGGUCUGGGAGGCGGAUAA | - |
| 1784 | 58525 | WIZ | promoter | chrl9:15449951-15451624 | chr19:15451237-15451256 | UCUGGGAGGCGGAUAAAGGA | - |
| 1785 | 58525 | WIZ | promoter | chrl9:15449951-15451624 | chr19: 15451236-15451255 | CUGGGAGGCGGAUAAAGGAA | - |
| 1786 | 58525 | WIZ | promoter | chrl9:15449951-15451624 | chr19: 15451235-15451254 | UGGGAGGCGGAUAAAGGAAG | - |
| 1787 | 58525 | WIZ | promoter | chrl9:15449951-15451624 | chr19: 15451229-15451248 | GCGGAUAAAGGAAGGGGGUC | - |
| 1788 | 58525 | WIZ | promoter | chrl9:15449951-15451624 | chr19:15451218-15451237 | AAGGGGGUCAGGUGUGGAGA | - |
| 1789 | 58525 | WIZ | promoter | chrl9:15449951-15451624 | chr19:15451214-15451233 | GGGUCAGGUGUGGAGAUGGU | - |
| 1790 | 58525 | WIZ | promoter | chrl9:15449951-15451624 | chr19:15451193-15451212 | GGAUACUGUGUAUGAAUGAU | - |
| 1791 | 58525 | WIZ | promoter | chrl9:15449951-15451624 | chr19:15451192-15451211 | GAUACUGUGUAUGAAUGAUU | - |
| 1792 | 58525 | WIZ | promoter | chrl9:15449951-15451624 | chr19:15451169-15451188 | UAAAUGAGUCAUUCAAAUCA | - |
| 1793 | 58525 | WIZ | promoter | chrl9:15449951-15451624 | chrl9:15451168-15451187 | AAAUGAGUCAUUCAAAUCAU | - |
| 1794 | 58525 | WIZ | promoter | chrl9:15449951-15451624 | chr19:15451161-15451180 | UCAUUCAAAUCAUGGGUGAG | - |
| 1795 | 58525 | WIZ | promoter | chrl9:15449951-15451624 | chr19:15451157-15451176 | UCAAAUCAUGGGUGAGUGGA | - |
| 1796 | 58525 | WIZ | promoter | chrl9:15449951-15451624 | chr19:15451128-15451147 | GGUAGAGUGGGUGGAGCAAA | - |
| 1797 | 58525 | WIZ | promoter | chrl9:15449951-15451624 | chr19:15451116-15451135 | GGAGCAAACGGCAGACGGAU | - |
| 1798 | 58525 | WIZ | promoter | chrl9:15449951-15451624 | chr19:15451089-15451108 | CAUUUGCUGGAUGUUUGACC | - |
| 1799 | 58525 | WIZ | promoter | chrl9:15449951-15451624 | chr19:15451068-15451087 | UACCCAGCUACUCA CCUACC | + |
| 1800 | 58525 | WIZ | promoter | chrl9:15449951-15451624 | chr19:15451073-15451092 | GACCUGGUAGGUGAGUAGCU | - |
| 1801 | 58525 | WIZ | promoter | chrl9:15449951-15451624 | chr19:15451066-15451085 | UAGGUGAGUAGCUGGGUAGU | - |
| 1802 | 58525 | WIZ | promoter | chrl9:15449951-15451624 | chr19:15451057-15451076 | AGCUGGGUAGUUGGUUAACC | - |
| 1803 | 58525 | WIZ | promoter | chrl9:15449951-15451624 | chr19: 15451033-15451052 | UGGGUAUGUCUGCCUAGAAA | - |
| 1804 | 58525 | WIZ | promoter | chrl9:15449951-15451624 | chr19:15450925-15450944 | UUCUCCACUGCCCA GUUCUC | + |
| 1805 | 58525 | WIZ | promoter | chrl9:15449951-15451624 | chr19:15450802-15450821 | CGGAAAGAUGUGUGUGGGGA | - |
| 1806 | 58525 | WIZ | promoter | chrl9:15449951-15451624 | chr19:15450797-15450816 | AGAUGUGUGUGGGGAUGGUU | - |
| 1807 | 58525 | WIZ | promoter | chrl9:15449951-15451624 | chrl9:15450786-15450805 | GGGAUGGUUGGGUACUUGCU | - |
| 1808 | 58525 | WIZ | promoter | chrl9:15449951-15451624 | chr19:15450720-15450739 | GUGGGUAGAUGGGAAGUGAA | - |
| 1809 | 58525 | WIZ | promoter | chrl9:15449951-15451624 | chr19:15450716-15450735 | GUAGAUGGGAAGUGAAUGGG | - |
| 1810 | 58525 | WIZ | promoter | chrl9:15449951-15451624 | chr19: 15450699-15450718 | GGGUGGGUUGAGUGGGUGUU | - |
| 1811 | 58525 | WIZ | promoter | chrl9:15449951-15451624 | chr19: 15450698-15450717 | GGUGGGUUGAGUGGGUGUUU | - |
| 1812 | 58525 | WIZ | promoter | chrl9:15449951-15451624 | chr19:15450683-15450702 | UGUUUGGGUGAAUUAAUAGG | - |
| 1813 | 58525 | WIZ | promoter | chrl9:15449951-15451624 | chr19:15450671-15450690 | UUAAUAGGUGGUUGGAGGGG | - |
| 1814 | 58525 | WIZ | promoter | chrl9:15449951-15451624 | chr19:15450597-15450616 | AGGAAGUGGAUGAGAUAGCU | - |
| 1815 | 58525 | WIZ | promoter | chrl9:15449951-15451624 | chr19: 15450594-15450613 | AAGUGGAUGAGAUAGCUAGG | - |
| 1816 | 58525 | WIZ | promoter | chrl9:15449951-15451624 | chr19: 15450533-15450552 | AGGCCAUGAUGUGUGUCUGA | - |
| 1817 | 58525 | WIZ | promoter | chrl9:15449951-15451624 | chr19:15450522-15450541 | UGUGUCUGAUGGGGUAGUCC | - |
| 1818 | 58525 | WIZ | promoter | chrl9:15449951-15451624 | chr19: 15450507-15450526 | AGUCCUGGAAGCUGUGAUCC | - |
| 1819 | 58525 | WIZ | promoter | chrl9:15449951-15451624 | chr19:15450500-15450519 | GAAGCUGUGAUCCUGGGAAC | - |
| 1820 | 58525 | WIZ | promoter | chrl9:15449951-15451624 | chr19: 15450499-15450518 | AAGCUGUGAUCCUGGGAACU | - |
| 1821 | 58525 | WIZ | promoter | chrl9:15449951-15451624 | chr19:15450490-15450509 | UCCUGGGAACUGGGUGGAGA | - |
| 1822 | 58525 | WIZ | promoter | chrl9:15449951-15451624 | chrl9:15450466-15450485 | GACUUAGGACUGAAGACCUA | - |
| 1823 | 58525 | WIZ | promoter | chrl9:15449951-15451624 | chrl9:15450428-15450447 | GGAGGUGCUGAAGUCCAGUG | - |
| 1824 | 58525 | WIZ | promoter | chrl9:15449951-15451624 | chr19:15450419-15450438 | GAAGUCCAGUGUGGAUGAUU | - |
| 1825 | 58525 | WIZ | promoter | chrl9:15449951-15451624 | chr19:15450415-15450434 | UCCAGUGUGGAUGAUUGGGA | - |
| 1826 | 58525 | WIZ | promoter | chrl9:15449951-15451624 | chr19:15450412-15450431 | AGUGUGGAUGAUUGGGAAGG | - |
| 1827 | 58525 | WIZ | promoter | chrl9:15449951-15451624 | chr19:15450380-15450399 | UGUGGUUGGAAGGUAGCUGA | - |
| 1828 | 58525 | WIZ | promoter | chrl9:15449951-15451624 | chr19:15450379-15450398 | GUGGUUGGAAGGUAGCUGAU | - |
| 1829 | 58525 | WIZ | promoter | chrl9:15449951-15451624 | chr19:15450378-15450397 | UGGUUGGAAGGUAGCUGAUG | - |
| 1830 | 58525 | WIZ | promoter | chrl9:15449951-15451624 | chr19:15450372-15450391 | GAAGGUAGCUGAUGGGGGGC | - |
| 1831 | 58525 | WIZ | promoter | chrl9:15449951-15451624 | chr19: 15450305-15450324 | GUCAUUGAUGGGUCAUUGAU | + |
| 1832 | 58525 | WIZ | promoter | chrl9:15449951-15451624 | chr19:15450260-15450279 | AAAGCACUAAAAGAGUGGGG | + |
| 1833 | 58525 | WIZ | promoter | chrl9:15449951-15451624 | chr19:15450257-15450276 | CUAAAAGCACUAAAAGAGUG | + |
| 1834 | 58525 | WIZ | promoter | chrl9:15449951-15451624 | chr19: 15450214-15450233 | GUGGGACGAUAAGGAGCCAU | - |
| 1835 | 58525 | WIZ | promoter | chrl9:15449951-15451624 | chr19:15450146-15450165 | GCCCGCACGGCCUG AGUCCA | + |
| 1836 | 58525 | WIZ | promoter | chrl9:15449951-15451624 | chr19:15450145-15450164 | GGCCCGCACGGCCU GAGUCC | + |
| 1837 | 58525 | WIZ | promoter | chrl9:15449951-15451624 | chr19:15450150-15450169 | UCCCUGGACUCAGGCCGUGC | - |
| 1838 | 58525 | WIZ | promoter | chrl9:15449951-15451624 | chr19:15450124-15450143 | CCAAGCGGGUCACC CUUAAA | + |
| 1839 | 58525 | WIZ | promoter | chrl9:15449951-15451624 | chr19:15450123-15450142 | GCCAAGCGGGUCACCCUUAA | + |
| 1840 | 58525 | WIZ | promoter | chrl9:15449951-15451624 | chr19:15450110-15450129 | CAUGUUGGGAGUGGCCAAGC | + |
| 1841 | 58525 | WIZ | promoter | chrl9:15449951-15451624 | chr19:15450112-15450131 | CCGCUUGGCCACUCCCAACA | - |
| 1842 | 58525 | WIZ | promoter | chrl9:15449951-15451624 | chr19:15450078-15450097 | GCCCCGGGGGGGGCGGCCAG | + |
| 1843 | 58525 | WIZ | promoter | chrl9:15449951-15451624 | chr19:15450071-15450090 | CCUCGCCGCCCCGG GGGGGG | + |
| 1844 | 58525 | WIZ | promoter | chrl9:15449951-15451624 | chr19:15450011-15450030 | CCCCGCCGCGCCGC CAUGAU | + |
| 1845 | 58525 | WIZ | promoter | chrl9:15449951-15451624 | chr19:15450010-15450029 | GCCCCGCCGCGCCG CCAUGA | + |
| 1846 | 58525 | WIZ | promoter | chrl9:15449951-15451624 | chr19:15450019-15450038 | ACCUCCCCAUCAUG GCGGCG | - |
| 1847 | 58525 | WIZ | promoter | chrl9:15449951-15451624 | chr19: 15449983-15450002 | CUGAGGUCACGGCGGCGCGC | - |
| 1848 | 58525 | WIZ | exon_01_nc | chr19:15449797-15449951 | chr19: 15449828-15449847 | GGGCUCGGAGCUCCCCUCCU | + |
| 1849 | 58525 | WIZ | exon_01_nc | chr19:15449797-15449951 | chr19:15449813-15449832 | GCCGGCCAGGUGCCGGGGCU | + |
| 1850 | 58525 | WIZ | exon_01_nc | chr19:15449797-15449951 | chr19:15449808-15449827 | GCGCCGCCGGCCAG GUGCCG | + |
| 1851 | 58525 | WIZ | exon_01_nc | chr19:15449797-15449951 | chr19:15449807-15449826 | GGCGCCGCCGGCCA GGUGCC | + |
| 1852 | 58525 | WIZ | exon_01_nc | chr19:15449797-15449951 | chrl9:15449786-15449805 | GCCGGGCCUCACCG GGGAGG | + |
| 1853 | 58525 | WIZ | exon_01_nc | chr19:15449797-15449951 | chr19:15449783-15449802 | CGGGCCGGGCCUCACCGGGG | + |
| 1854 | 58525 | WIZ | intron_01 | chr19:15449608-15449797 | chr19:15449763-15449782 | CACCCGCGGGCUCC CCAGGC | + |
| 1855 | 58525 | WIZ | exon_02_nc | chrl9:15449466-15449608 | chr19:15449583-15449602 | CCUACCUCGGCGCGUCCCGC | - |
| 1856 | 58525 | WIZ | exon_02_nc | chrl9:15449466-15449608 | chr19:15449559-15449578 | UCUCCUGCCCCGGGGUGCAC | - |
| 1857 | 58525 | WIZ | exon_02_nc | chrl9:15449466-15449608 | chr19:15449519-15449538 | UCCUCGGGGGUCCAGGGUCC | + |
| 1858 | 58525 | WIZ | exon_02_nc | chrl9:15449466-15449608 | chrl9:15449518-15449537 | GACCCUGGACCCCC GAGGAG | - |
| 1859 | 58525 | WIZ | exon_02_nc | chrl9:15449466-15449608 | chr19:15449504-15449523 | GCCGCGCGGGCCCA CUCCUC | + |
| 1860 | 58525 | WIZ | exon_02_nc | chrl9:15449466-15449608 | chr19:15449503-15449522 | CGCCGCGCGGGCCC ACUCCU | + |
| 1861 | 58525 | WIZ | exon_02_nc | chrl9:15449466-15449608 | chr19:15449490-15449509 | GAGGUGGGGGCUGCGCCGCG | + |
| 1862 | 58525 | WIZ | exon_02_nc | chrl9:15449466-15449608 | chr19:15449474-15449493 | CCCCCCAGGGGUCG CAGAGG | + |
| 1863 | 58525 | WIZ | exon_02_nc | chrl9:15449466-15449608 | chr19:15449481-15449500 | GCCCCCACCUCUGC GACCCC | - |
| 1864 | 58525 | WIZ | exon_02_nc | chrl9:15449466-15449608 | chr19:15449480-15449499 | CCCCCACCUCUGCG ACCCCU | - |
| 1865 | 58525 | WIZ | exon_02_nc | chrl9:15449466-15449608 | chrl9:15449478-15449497 | CCCACCUCUGCGAC CCCUGG | - |
| 1866 | 58525 | WIZ | exon_02_nc | chrl9:15449466-15449608 | chrl9:15449461-15449480 | UCCUACCCGGACGC CCCCCA | + |
| 1867 | 58525 | WIZ | intron_02 | chr19:15448367-15449466 | chr19:15449437-15449456 | ACUUUGGCAGCGUGGGGAGG | + |
| 1868 | 58525 | WIZ | intron_02 | chr19:15448367-15449466 | chrl9:15449436-15449455 | CACUUUGGCAGCGUGGGGAG | + |
| 1869 | 58525 | WIZ | intron_02 | chr19:15448367-15449466 | chr19:15449359-15449378 | GCAGGUGCUUCCUCCGGGCC | - |
| 1870 | 58525 | WIZ | intron_02 | chr19:15448367-15449466 | chr19:15449354-15449373 | UGCUUCCUCCGGGCCUGGGU | - |
| 1871 | 58525 | WIZ | intron_02 | chr19:15448367-15449466 | chr19:15449353-15449372 | GCUUCCUCCGGGCCUGGGUA | - |
| 1872 | 58525 | WIZ | intron_02 | chr19:15448367-15449466 | chr19:15449320-15449339 | CCUCCGUGGGCUGGCAGUCU | + |
| 1873 | 58525 | WIZ | intron_02 | chr19:15448367-15449466 | chr19:15449311-15449330 | CAGGGGGCUCCUCCGUGGGC | + |
| 1874 | 58525 | WIZ | intron_02 | chr19:15448367-15449466 | chr19:15449307-15449326 | UUCCCAGGGGGCUCCUCCGU | + |
| 1875 | 58525 | WIZ | intron_02 | chr19:15448367-15449466 | chr19:15449312-15449331 | AGCCCACGGAGGAGCCCCCU | - |
| 1876 | 58525 | WIZ | intron_02 | chr19:15448367-15449466 | chr19:15449275-15449294 | GGUUGCAGGCGCUGCCCUCG | + |
| 1877 | 58525 | WIZ | intron_02 | chr19:15448367-15449466 | chr19:15449270-15449289 | GCAGCGCCUGCAAC CAGGCC | - |
| 1878 | 58525 | WIZ | intron_02 | chr19:15448367-15449466 | chr19:15449236-15449255 | GGGCCCAGGCAACC GGGGCG | + |
| 1879 | 58525 | WIZ | intron_02 | chr19:15448367-15449466 | chr19:15449229-15449248 | GGAGGCCGGGCCCAGGCAAC | + |
| 1880 | 58525 | WIZ | intron_02 | chr19:15448367-15449466 | chr19:15449206-15449225 | CGCCCUCCCCAGGG AGAUGG | + |
| 1881 | 58525 | WIZ | intron_02 | chr19:15448367-15449466 | chr19:15449131-15449150 | AGGACAACCCCCGC UCCCCA | - |
| 1882 | 58525 | WIZ | intron_02 | chr19:15448367-15449466 | chr19:15449112-15449131 | GGUCCAGAAAUGAGGACCCU | + |
| 1883 | 58525 | WIZ | intron_02 | chr19:15448367-15449466 | chrl9:15449111-15449130 | UGGUCCAGAAAUGAGGACCC | + |
| 1884 | 58525 | WIZ | intron_02 | chr19:15448367-15449466 | chr19:15449091-15449110 | AAAGAAAACGAUAGGGCUCC | + |
| 1885 | 58525 | WIZ | intron_02 | chr19:15448367-15449466 | chr19:15449063-15449082 | GACUAGAGCAAUCUUGGUUG | - |
| 1886 | 58525 | WIZ | intron_02 | chr19:15448367-15449466 | chr19:15449062-15449081 | ACUAGAGCAAUCUUGGUUGG | - |
| 1887 | 58525 | WIZ | intron_02 | chr19:15448367-15449466 | chr19:15449057-15449076 | AGCAAUCUUGGUUGGGGGGU | - |
| 1888 | 58525 | WIZ | intron_02 | chr19:15448367-15449466 | chr19:15449056-15449075 | GCAAUCUUGGUUGGGGGGUG | - |
| 1889 | 58525 | WIZ | intron_02 | chr19:15448367-15449466 | chr19: 15449055-15449074 | CAAUCUUGGUUGGGGGGUGG | - |
| 1890 | 58525 | WIZ | intron_02 | chr19:15448367-15449466 | chr19:15449018-15449037 | CCCUCAUGCAUACC CAGCUU | + |
| 1891 | 58525 | WIZ | intron_02 | chr19:15448367-15449466 | chr19:15449017-15449036 | UCCCUCAUGCAUACCCAGCU | + |
| 1892 | 58525 | WIZ | intron_02 | chr19:15448367-15449466 | chr19:15449022-15449041 | GCCCAAGCUGGGUAUGCAUG | - |
| 1893 | 58525 | WIZ | intron_02 | chr19:15448367-15449466 | chr19:15449021-15449040 | CCCAAGCUGGGUAUGCAUGA | - |
| 1894 | 58525 | WIZ | intron_02 | chr19:15448367-15449466 | chr19: 15448996-15449015 | AAUGUUGGGGAGAAGCGAAA | - |
| 1895 | 58525 | WIZ | intron_02 | chr19:15448367-15449466 | chr19:15448986-15449005 | AGAAGCGAAAGGGUUAAUGC | - |
| 1896 | 58525 | WIZ | intron_02 | chr19:15448367-15449466 | chr19:15448914-15448933 | AGAACCCUAAGGUCCUGUGU | - |
| 1897 | 58525 | WIZ | intron_02 | chr19:15448367-15449466 | chr19:15448913-15448932 | GAACCCUAAGGUCCUGUGUG | - |
| 1898 | 58525 | WIZ | intron_02 | chr19:15448367-15449466 | chr19:15448912-15448931 | AACCCUAAGGUCCUGUGUGG | - |
| 1899 | 58525 | WIZ | intron_02 | chr19:15448367-15449466 | chr19:15448898-15448917 | CUCCAACCCUUCCC CCACAC | + |
| 1900 | 58525 | WIZ | intron_02 | chr19:15448367-15449466 | chr19:15448844-15448863 | AACCCAAUGGAGAAAAGUAA | - |
| 1901 | 58525 | WIZ | intron_02 | chr19:15448367-15449466 | chr19:15448843-15448862 | ACCCAAUGGAGAAAAGUAAA | - |
| 1902 | 58525 | WIZ | intron_02 | chr19:15448367-15449466 | chr19:15448842-15448861 | CCCAAUGGAGAAAAGUAAAG | - |
| 1903 | 58525 | WIZ | intron_02 | chr19:15448367-15449466 | chr19:15448801-15448820 | CUCUGAUCCUAUACACCGUC | + |
| 1904 | 58525 | WIZ | intron_02 | chr19:15448367-15449466 | chr19:15448725-15448744 | GUGUGCAUGGAUGUGAGGGC | - |
| 1905 | 58525 | WIZ | intron_02 | chr19:15448367-15449466 | chrl9:15448661-15448680 | UGGAGAAAUGGUAAGAUUGA | - |
| 1906 | 58525 | WIZ | intron_02 | chr19:15448367-15449466 | chr19:15448584-15448603 | GCAGGAUCUGUAUAAAGGGG | - |
| 1907 | 58525 | WIZ | intron_02 | chr19:15448367-15449466 | chr19:15448572-15448591 | UAAAGGGGAGGAGUUAUUGA | - |
| 1908 | 58525 | WIZ | intron_02 | chr19:15448367-15449466 | chr19:15448571-15448590 | AAAGGGGAGGAGUUAUUGAU | - |
| 1909 | 58525 | WIZ | intron_02 | chr19:15448367-15449466 | chr19:15448570-15448589 | AAGGGGAGGAGUUAUUGAUG | - |
| 1910 | 58525 | WIZ | intron_02 | chr19:15448367-15449466 | chr19:15448564-15448583 | AGGAGUUAUUGAUGGGGAGA | - |
| 1911 | 58525 | WIZ | intron_02 | chr19:15448367-15449466 | chr19:15448550-15448569 | GGGAGACGGAGGCAUGCUGA | - |
| 1912 | 58525 | WIZ | intron_02 | chr19:15448367-15449466 | chr19:15448546-15448565 | GACGGAGGCAUGCUGAGGGU | - |
| 1913 | 58525 | WIZ | intron_02 | chr19:15448367-15449466 | chr19:15448544-15448563 | CGGAGGCAUGCUGAGGGUAG | - |
| 1914 | 58525 | WIZ | intron_02 | chr19:15448367-15449466 | chr19:15448518-15448537 | CCACACACCUUCUA UCCCAA | + |
| 1915 | 58525 | WIZ | intron_02 | chr19:15448367-15449466 | chr19:15448515-15448534 | GGAUAGAAGGUGUGUGGAAA | - |
| 1916 | 58525 | WIZ | intron_02 | chr19:15448367-15449466 | chr19:15448481-15448500 | UCCCAGCCCAGGGGAGCUAA | + |
| 1917 | 58525 | WIZ | intron_02 | chr19:15448367-15449466 | chr19:15448490-15448509 | UGAACACCAUUAGCUCCCCU | - |
| 1918 | 58525 | WIZ | intron_02 | chr19:15448367-15449466 | chr19:15448486-15448505 | CACCAUUAGCUCCC CUGGGC | - |
| 1919 | 58525 | WIZ | intron_02 | chr19:15448367-15449466 | chr19:15448485-15448504 | ACCAUUAGCUCCCC UGGGCU | - |
| 1920 | 58525 | WIZ | intron_02 | chr19:15448367-15449466 | chr19:15448470-15448489 | CUCAGUUUACCUCCCAGCCC | + |
| 1921 | 58525 | WIZ | intron_02 | chr19:15448367-15449466 | chr19:15448482-15448501 | AUUAGCUCCCCUGGGCUGGG | - |
| 1922 | 58525 | WIZ | intron_02 | chr19:15448367-15449466 | chr19:15448472-15448491 | CUGGGCUGGGAGGUAAACUG | - |
| 1923 | 58525 | WIZ | intron_02 | chr19:15448367-15449466 | chr19:15448430-15448449 | GGACUGAGGUUUUGAGGGAU | - |
| 1924 | 58525 | WIZ | intron_02 | chr19:15448367-15449466 | chr19:15448351-15448370 | AGCGGGGCAUUGUGGGCCUG | + |
| 1925 | 58525 | WIZ | exon_03_nc | chr19:15448307-15448367 | chr19:15448343-15448362 | ACCGGCUCAGCGGGGCAUUG | + |
| 1926 | 58525 | WIZ | exon_03_nc | chr19:15448307-15448367 | chr19: 15448333-15448352 | CAGCUGCUGCACCGGCUCAG | + |
| 1927 | 58525 | WIZ | exon_03_nc | chr19:15448307-15448367 | chr19:15448347-15448366 | CCCACAAUGCCCCG CUGAGC | - |
| 1928 | 58525 | WIZ | exon_03_c | chr19:15448102-15448307 | chr19:15448304-15448323 | AAGCAGAGAAAAUCCGAUGG | - |
| 1929 | 58525 | WIZ | exon_03_c | chr19:15448102-15448307 | chr19:15448302-15448321 | GCAGAGAAAAUCCGAUGGAG | - |
| 1930 | 58525 | WIZ | exon_03_c | chr19:15448102-15448307 | chr19:15448243-15448262 | GGCAGUCUCUCUGGGCCUUG | + |
| 1931 | 58525 | WIZ | exon_03_c | chr19:15448102-15448307 | chr19:15448241-15448260 | CAGGCAGUCUCUCUGGGCCU | + |
| 1932 | 58525 | WIZ | exon_03_c | chr19:15448102-15448307 | chr19: 15448229-15448248 | ACUGCCUGGCCCGGCGCCAA | - |
| 1933 | 58525 | WIZ | exon_03_c | chr19:15448102-15448307 | chr19:15448213-15448232 | CCAAGGGAGAACAUCGAGGG | - |
| 1934 | 58525 | WIZ | exon_03_c | chr19:15448102-15448307 | chr19:15448185-15448204 | ACCUUCCCCCUCAG CAGCUU | + |
| 1935 | 58525 | WIZ | exon_03_c | chr19:15448102-15448307 | chr19:15448195-15448214 | GGUGGGGCCGAAGCUGCUGA | - |
| 1936 | 58525 | WIZ | exon_03_c | chr19:15448102-15448307 | chr19:15448194-15448213 | GUGGGGCCGAAGCUGCUGAG | - |
| 1937 | 58525 | WIZ | exon_03_c | chr19:15448102-15448307 | chr19:15448154-15448173 | CAGGCAGGUAACGGGUGGAC | + |
| 1938 | 58525 | WIZ | exon_03_c | chr19:15448102-15448307 | chr19:15448149-15448168 | GGUGACAGGCAGGUAACGGG | + |
| 1939 | 58525 | WIZ | exon_03_c | chr19:15448102-15448307 | chr19:15448145-15448164 | CCUUGGUGACAGGCAGGUAA | + |
| 1940 | 58525 | WIZ | exon_03_c | chr19:15448102-15448307 | chr19:15448135-15448154 | CGGGGGCCCUCCUUGGUGAC | + |
| 1941 | 58525 | WIZ | exon_03_c | chr19:15448102-15448307 | chr19:15448148-15448167 | CCGUUACCUGCCUGUCACCA | - |
| 1942 | 58525 | WIZ | exon_03_c | chr19:15448102-15448307 | chrl9:15448116-15448135 | UCUGCCAUCCAGAAUGUCUC | + |
| 1943 | 58525 | WIZ | intron_03 | chrl9:15442748-15448102 | chr19:15448094-15448113 | UGGCAUCUCUGGUAAGAGAA | - |
| 1944 | 58525 | WIZ | intron_03 | chrl9:15442748-15448102 | chr19:15448059-15448078 | AUGGGCUGGAUGCUCCCUGG | + |
| 1945 | 58525 | WIZ | intron_03 | chrl9:15442748-15448102 | chr19:15448008-15448027 | AGCUCAGCCGCUGCUGCGCU | + |
| 1946 | 58525 | WIZ | intron_03 | chrl9:15442748-15448102 | chr19:15448007-15448026 | CAGCUCAGCCGCUGCUGCGC | + |
| 1947 | 58525 | WIZ | intron_03 | chrl9:15442748-15448102 | chr19:15448018-15448037 | CAAGUCACCCAGCG CAGCAG | - |
| 1948 | 58525 | WIZ | intron_03 | chrl9:15442748-15448102 | chr19:15447973-15447992 | GAAAAGGCUCUGGACCCAAG | + |
| 1949 | 58525 | WIZ | intron_03 | chrl9:15442748-15448102 | chr19:15447903-15447922 | UGGUCUGGUCACUGGCUCCC | + |
| 1950 | 58525 | WIZ | intron_03 | chrl9:15442748-15448102 | chr19:15447895-15447914 | GGGAGCCUUGGUCUGGUCAC | + |
| 1951 | 58525 | WIZ | intron_03 | chrl9:15442748-15448102 | chr19:15447819-15447838 | AGCAUACUAAUUGGGUCCAG | - |
| 1952 | 58525 | WIZ | intron_03 | chrl9:15442748-15448102 | chr19:15447759-15447778 | GGGAAUACCUGUGGAAUAAG | + |
| 1953 | 58525 | WIZ | intron_03 | chrl9:15442748-15448102 | chr19:15447738-15447757 | UGGGAUAGACUGAUGGGAGU | + |
| 1954 | 58525 | WIZ | intron_03 | chrl9:15442748-15448102 | chr19:15447732-15447751 | GGGAGCUGGGAUAGACUGAU | + |
| 1955 | 58525 | WIZ | intron_03 | chrl9:15442748-15448102 | chr19:15447730-15447749 | CAGUCUAUCCCAGCUCCCUC | - |
| 1956 | 58525 | WIZ | intron_03 | chrl9:15442748-15448102 | chr19:15447711-15447730 | GGAUACACCCAGAC AGCCAG | + |
| 1957 | 58525 | WIZ | intron_03 | chrl9:15442748-15448102 | chrl9:15447721-15447740 | CCAGCUCCCUCUGGCUGUCU | - |
| 1958 | 58525 | WIZ | intron_03 | chrl9:15442748-15448102 | chr19:15447690-15447709 | UUGGCCCGUGGUUCAGGAAC | + |
| 1959 | 58525 | WIZ | intron_03 | chrl9:15442748-15448102 | chr19:15447678-15447697 | ACAGAAGCUGUUUUGGCCCG | + |
| 1960 | 58525 | WIZ | intron_03 | chrl9:15442748-15448102 | chr19:15447671-15447690 | AGCCACUACAGAAGCUGUUU | + |
| 1961 | 58525 | WIZ | intron_03 | chrl9:15442748-15448102 | chr19:15447670-15447689 | AACAGCUUCUGUAGUGGCUA | - |
| 1962 | 58525 | WIZ | intron_03 | chrl9:15442748-15448102 | chr19:15447660-15447679 | GUAGUGGCUAGGGAGAGGCU | - |
| 1963 | 58525 | WIZ | intron_03 | chrl9:15442748-15448102 | chr19:15447633-15447652 | CAGCGAUGCUGGCUACCCCU | - |
| 1964 | 58525 | WIZ | intron_03 | chrl9:15442748-15448102 | chr19:15447615-15447634 | UUUUUGCUGGGUAAACCAAG | + |
| 1965 | 58525 | WIZ | intron_03 | chrl9:15442748-15448102 | chrl9:15447616-15447635 | CCUUGGUUUACCCAGCAAAA | - |
| 1966 | 58525 | WIZ | intron_03 | chrl9:15442748-15448102 | chr19:15447572-15447591 | UGAAUGAAUAACACGUCUGG | + |
| 1967 | 58525 | WIZ | intron_03 | chrl9:15442748-15448102 | chr19:15447349-15447368 | GAGGGUCUCCCAGGUCUCCC | + |
| 1968 | 58525 | WIZ | intron_03 | chrl9:15442748-15448102 | chr19:15447340-15447359 | UCUAUCAGGGAGGGUCUCCC | + |
| 1969 | 58525 | WIZ | intron_03 | chrl9:15442748-15448102 | chr19:15447330-15447349 | CAAAUGCCACUCUA UCAGGG | + |
| 1970 | 58525 | WIZ | intron_03 | chrl9:15442748-15448102 | chr19:15447327-15447346 | AUUCAAAUGCCACUCUAUCA | + |
| 1971 | 58525 | WIZ | intron_03 | chrl9:15442748-15448102 | chr19:15447243-15447262 | GUCAGGCUCCUCCCCACCAC | + |
| 1972 | 58525 | WIZ | intron_03 | chrl9:15442748-15448102 | chrl9:15447216-15447235 | CCAGCCUCCUACCA GGUCCU | + |
| 1973 | 58525 | WIZ | intron_03 | chrl9:15442748-15448102 | chr19:15447137-15447156 | CACGGAGGAAGCCCUUGAUG | + |
| 1974 | 58525 | WIZ | intron_03 | chrl9:15442748-15448102 | chr19:15447119-15447138 | AUCUUGCAAAAGCCUUGGCA | + |
| 1975 | 58525 | WIZ | intron_03 | chrl9:15442748-15448102 | chr19:15447080-15447099 | GGCUAUUCCACAGGGUUCUU | + |
| 1976 | 58525 | WIZ | intron_03 | chrl9:15442748-15448102 | chr19:15447059-15447078 | ACACGGGAUAAUAAUAAUGA | + |
| 1977 | 58525 | WIZ | intron_03 | chrl9:15442748-15448102 | chr19:15447016-15447035 | GCAACUUAUGUCACCGCUCA | + |
| 1978 | 58525 | WIZ | intron_03 | chrl9:15442748-15448102 | chr19:15447015-15447034 | GGCAACUUAUGUCACCGCUC | + |
| 1979 | 58525 | WIZ | intron_03 | chrl9:15442748-15448102 | chr19:15446993-15447012 | ACUCCCUGGCUAGGUGACGU | + |
| 1980 | 58525 | WIZ | intron_03 | chrl9:15442748-15448102 | chr19:15446984-15447003 | AGCCAUGUUACUCCCUGGCU | + |
| 1981 | 58525 | WIZ | intron_03 | chrl9:15442748-15448102 | chr19:15446979-15446998 | UGUCAAGCCAUGUUACUCCC | + |
| 1982 | 58525 | WIZ | intron_03 | chrl9:15442748-15448102 | chr19:15446939-15446958 | GGAUCUGUGAGGAUGCAGCA | + |
| 1983 | 58525 | WIZ | intron_03 | chrl9:15442748-15448102 | chr19:15446938-15446957 | AGGAUCUGUGAGGAUGCAGC | + |
| 1984 | 58525 | WIZ | intron_03 | chrl9:15442748-15448102 | chr19:15446810-15446829 | GGGGUCUAUGAGAGCGAGGA | + |
| 1985 | 58525 | WIZ | intron_03 | chrl9:15442748-15448102 | chr19:15446791-15446810 | CUCCCCAGCCUCAG AUGGUG | + |
| 1986 | 58525 | WIZ | intron_03 | chrl9:15442748-15448102 | chrl9:15446668-15446687 | UCACUUCCUGCAGGAACUCC | + |
| 1987 | 58525 | WIZ | intron_03 | chrl9:15442748-15448102 | chr19:15446622-15446641 | UGCUUGCUUCCCCCUUGGUC | + |
| 1988 | 58525 | WIZ | intron_03 | chrl9:15442748-15448102 | chr19:15446560-15446579 | UGGUGGCAUCUGCAGGUGUC | - |
| 1989 | 58525 | WIZ | intron_03 | chrl9:15442748-15448102 | chr19:15446554-15446573 | CAUCUGCAGGUGUCAGGCAG | - |
| 1990 | 58525 | WIZ | intron_03 | chrl9:15442748-15448102 | chr19:15446544-15446563 | UGUCAGGCAGUGGGGUGGCA | - |
| 1991 | 58525 | WIZ | intron_03 | chrl9:15442748-15448102 | chr19:15446513-15446532 | GGUGUACCCUCUGCCCUCAG | + |
| 1992 | 58525 | WIZ | intron_03 | chrl9:15442748-15448102 | chr19:15446512-15446531 | GGGUGUACCCUCUGCCCUCA | + |
| 1993 | 58525 | WIZ | intron_03 | chrl9:15442748-15448102 | chr19:15446511-15446530 | UGGGUGUACCCUCUGCCCUC | + |
| 1994 | 58525 | WIZ | intron_03 | chrl9:15442748-15448102 | chr19:15446492-15446511 | AGUGCUGAUACUCUGGAGUU | + |
| 1995 | 58525 | WIZ | intron_03 | chrl9:15442748-15448102 | chr19:15446451-15446470 | UUAUUAAUGGCUUAGAGGAG | + |
| 1996 | 58525 | WIZ | intron_03 | chrl9:15442748-15448102 | chr19:15446449-15446468 | AGUUAUUAAUGGCUUAGAGG | + |
| 1997 | 58525 | WIZ | intron_03 | chrl9:15442748-15448102 | chr19:15446438-15446457 | GUUAUUAACUCAGUUAUUAA | + |
| 1998 | 58525 | WIZ | intron_03 | chrl9:15442748-15448102 | chr19:15446386-15446405 | CCCUGGCCGGCUGUGCGACC | + |
| 1999 | 58525 | WIZ | intron_03 | chrl9:15442748-15448102 | chr19:15446306-15446325 | CCUCUCUGGGUCUGGUUCCG | - |
| 2000 | 58525 | WIZ | intron_03 | chrl9:15442748-15448102 | chr19:15446260-15446279 | CCAGACCUGGGGCAUCUGCG | + |
| 2001 | 58525 | WIZ | intron_03 | chrl9:15442748-15448102 | chr19:15446263-15446282 | CCUCGCAGAUGCCC CAGGUC | - |
| 2002 | 58525 | WIZ | intron_03 | chrl9:15442748-15448102 | chr19:15446262-15446281 | CUCGCAGAUGCCCC AGGUCU | - |
| 2003 | 58525 | WIZ | intron_03 | chrl9:15442748-15448102 | chr19:15446217-15446236 | AGGUGCAUCCUCACUCCCAC | - |
| 2004 | 58525 | WIZ | intron_03 | chrl9:15442748-15448102 | chr19:15446216-15446235 | GGUGCAUCCUCACUCCCACU | - |
| 2005 | 58525 | WIZ | intron_03 | chrl9:15442748-15448102 | chr19:15446215-15446234 | GUGCAUCCUCACUCCCACUG | - |
| 2006 | 58525 | WIZ | intron_03 | chrl9:15442748-15448102 | chr19:15446204-15446223 | CUCCCACUGGGGAAUCACCC | - |
| 2007 | 58525 | WIZ | intron_03 | chrl9:15442748-15448102 | chr19:15446203-15446222 | UCCCACUGGGGAAUCACCCA | - |
| 2008 | 58525 | WIZ | intron_03 | chrl9:15442748-15448102 | chr19:15446184-15446203 | AGAUGCACGUAUGAGACCCU | + |
| 2009 | 58525 | WIZ | intron_03 | chrl9:15442748-15448102 | chr19:15446117-15446136 | GAAACCUUCAAGGGUGGGCC | + |
| 2010 | 58525 | WIZ | intron_03 | chrl9:15442748-15448102 | chrl9:15446111-15446130 | CUGAGGGAAACCUUCAAGGG | + |
| 2011 | 58525 | WIZ | intron_03 | chrl9:15442748-15448102 | chr19:15446072-15446091 | GAAUGGCUUGACUUGGAGUG | - |
| 2012 | 58525 | WIZ | intron_03 | chrl9:15442748-15448102 | chr19:15446066-15446085 | CUUGACUUGGAGUGAGGUCA | - |
| 2013 | 58525 | WIZ | intron_03 | chrl9:15442748-15448102 | chr19:15446041-15446060 | UGAAUGUUGGAAGAAUGCCU | - |
| 2014 | 58525 | WIZ | intron_03 | chrl9:15442748-15448102 | chr19:15446036-15446055 | GUUGGAAGAAUGCCUGGGUU | - |
| 2015 | 58525 | WIZ | intron_03 | chrl9:15442748-15448102 | chr19:15446035-15446054 | UUGGAAGAAUGCCUGGGUUU | - |
| 2016 | 58525 | WIZ | intron_03 | chrl9:15442748-15448102 | chr19:15445988-15446007 | GGGAGAUCAAGCGGGCAGAG | + |
| 2017 | 58525 | WIZ | intron_03 | chrl9:15442748-15448102 | chr19:15445983-15446002 | CCCGCUUGAUCUCCCCCUCC | - |
| 2018 | 58525 | WIZ | intron_03 | chrl9:15442748-15448102 | chr19:15445962-15445981 | UAGGGCAGGUGCCCGUGUCC | + |
| 2019 | 58525 | WIZ | intron_03 | chrl9:15442748-15448102 | chr19:15445939-15445958 | GUCUUGUGAUGCCUAUAAAU | - |
| 2020 | 58525 | WIZ | intron_03 | chrl9:15442748-15448102 | chr19:15445880-15445899 | GUGGGGAUAAAGGAAGGCCC | + |
| 2021 | 58525 | WIZ | intron_03 | chrl9:15442748-15448102 | chr19:15445851-15445870 | AGAGCCCCCCAAGA GCACAC | - |
| 2022 | 58525 | WIZ | intron_03 | chrl9:15442748-15448102 | chr19:15445817-15445836 | GCCCAGGCAGGGAAGUUUGG | + |
| 2023 | 58525 | WIZ | intron_03 | chrl9:15442748-15448102 | chr19:15445815-15445834 | AAACUUCCCUGCCUGGGCAG | - |
| 2024 | 58525 | WIZ | intron_03 | chrl9:15442748-15448102 | chrl9:15445766-15445785 | UCUGGGUAAACAGCCGUAAC | + |
| 2025 | 58525 | WIZ | intron_03 | chrl9:15442748-15448102 | chr19:15445698-15445717 | CCCUGAGUCUUUUCUGAACC | + |
| 2026 | 58525 | WIZ | intron_03 | chrl9:15442748-15448102 | chr19:15445694-15445713 | CAGAAAAGACUCAGGGGCUG | - |
| 2027 | 58525 | WIZ | intron_03 | chrl9:15442748-15448102 | chr19:15445635-15445654 | CUGGCAUUGUGUUGGGGACA | - |
| 2028 | 58525 | WIZ | intron_03 | chrl9:15442748-15448102 | chr19:15445607-15445626 | AUGAUAUGUCAUUUGUCCCU | + |
| 2029 | 58525 | WIZ | intron_03 | chrl9:15442748-15448102 | chr19:15445539-15445558 | UGACCGGACCUGAGGCUCUG | - |
| 2030 | 58525 | WIZ | intron_03 | chrl9:15442748-15448102 | chr19:15445484-15445503 | UGAACCAGCCCUGAUCCCCC | - |
| 2031 | 58525 | WIZ | intron_03 | chrl9:15442748-15448102 | chr19:15445440-15445459 | CCAGAGAAGUGGCGGUGGAG | + |
| 2032 | 58525 | WIZ | intron_03 | chrl9:15442748-15448102 | chrl9:15445438-15445457 | AUCCAGAGAAGUGGCGGUGG | + |
| 2033 | 58525 | WIZ | intron_03 | chrl9:15442748-15448102 | chr19:15445435-15445454 | UCCAUCCAGAGAAGUGGCGG | + |
| 2034 | 58525 | WIZ | intron_03 | chrl9:15442748-15448102 | chr19:15445432-15445451 | UGCUCCAUCCAGAGAAGUGG | + |
| 2035 | 58525 | WIZ | intron_03 | chrl9:15442748-15448102 | chr19:15445439-15445458 | UCCACCGCCACUUC UCUGGA | - |
| 2036 | 58525 | WIZ | intron_03 | chrl9:15442748-15448102 | chrl9:15445416-15445435 | AGCAUUUACUACAAUCUUGC | - |
| 2037 | 58525 | WIZ | intron_03 | chrl9:15442748-15448102 | chr19:15445403-15445422 | AUCUUGCUGGCACCCAUUGC | - |
| 2038 | 58525 | WIZ | intron_03 | chrl9:15442748-15448102 | chr19:15445387-15445406 | CAGUCUCGCAGGGCCAGCAA | + |
| 2039 | 58525 | WIZ | intron_03 | chrl9:15442748-15448102 | chr19:15445303-15445322 | UACCCCAGGGGUGCCCUGAA | + |
| 2040 | 58525 | WIZ | intron_03 | chrl9:15442748-15448102 | chr19:15445302-15445321 | AUACCCCAGGGGUGCCCUGA | + |
| 2041 | 58525 | WIZ | intron_03 | chrl9:15442748-15448102 | chrl9:15445231-15445250 | UCCAAGCCUGGGGUUCAACU | + |
| 2042 | 58525 | WIZ | intron_03 | chrl9:15442748-15448102 | chr19:15445217-15445236 | CUUGGAGUUCAGGCUGCUUA | - |
| 2043 | 58525 | WIZ | intron_03 | chrl9:15442748-15448102 | chr19:15445187-15445206 | UUUGCAAAUGCUGAUGGCAA | + |
| 2044 | 58525 | WIZ | intron_03 | chrl9:15442748-15448102 | chrl9:15445181-15445200 | AGAGAGUUUGCAAAUGCUGA | + |
| 2045 | 58525 | WIZ | intron_03 | chrl9:15442748-15448102 | chrl9:15445181-15445200 | UCAGCAUUUGCAAACUCUCU | - |
| 2046 | 58525 | WIZ | intron_03 | chrl9:15442748-15448102 | chr19:15445153-15445172 | CCAGAUGGCAGGAGCCAACA | - |
| 2047 | 58525 | WIZ | intron_03 | chrl9:15442748-15448102 | chr19:15445144-15445163 | AGGAGCCAACAAGGGCCCCU | - |
| 2048 | 58525 | WIZ | intron_03 | chrl9:15442748-15448102 | chr19:15445124-15445143 | CUUAGGCAGUGGCCAUGCCA | + |
| 2049 | 58525 | WIZ | intron_03 | chrl9:15442748-15448102 | chr19:15445113-15445132 | AGGUCGCAGCCCUUAGGCAG | + |
| 2050 | 58525 | WIZ | intron_03 | chrl9:15442748-15448102 | chr19:15445125-15445144 | UUGGCAUGGCCACUGCCUAA | - |
| 2051 | 58525 | WIZ | intron_03 | chrl9:15442748-15448102 | chr19:15445076-15445095 | GGGGAUCCAGGAGUCCCUAC | + |
| 2052 | 58525 | WIZ | intron_03 | chrl9:15442748-15448102 | chr19:15445075-15445094 | UGGGGAUCCAGGAGUCCCUA | + |
| 2053 | 58525 | WIZ | intron_03 | chrl9:15442748-15448102 | chr19:15445057-15445076 | AGAGGCCUCCACAGUUGAUG | + |
| 2054 | 58525 | WIZ | intron_03 | chrl9:15442748-15448102 | chr19:15445058-15445077 | CCAUCAACUGUGGAGGCCUC | - |
| 2055 | 58525 | WIZ | intron_03 | chrl9:15442748-15448102 | chr19:15445057-15445076 | CAUCAACUGUGGAGGCCUCU | - |
| 2056 | 58525 | WIZ | intron_03 | chrl9:15442748-15448102 | chr19:15445024-15445043 | GUCCAAGACACCUUGGGGGU | + |
| 2057 | 58525 | WIZ | intron_03 | chrl9:15442748-15448102 | chr19:15445017-15445036 | GCCCUGUGUCCAAGACACCU | + |
| 2058 | 58525 | WIZ | intron_03 | chrl9:15442748-15448102 | chrl9:15444978-15444997 | UUUAGUGGCAGUGACUUUGG | + |
| 2059 | 58525 | WIZ | intron_03 | chrl9:15442748-15448102 | chr19:15444852-15444871 | CCCCAAGCUCCCAA GAUUCC | + |
| 2060 | 58525 | WIZ | intron_03 | chrl9:15442748-15448102 | chr19:15444857-15444876 | CGCCCGGAAUCUUGGGAGCU | - |
| 2061 | 58525 | WIZ | intron_03 | chrl9:15442748-15448102 | chr19:15444821-15444840 | UCCCGGGCAUCCUGCUUUUG | + |
| 2062 | 58525 | WIZ | intron_03 | chrl9:15442748-15448102 | chr19:15444805-15444824 | GGUGUGGGUCUGAGGGUCCC | + |
| 2063 | 58525 | WIZ | intron_03 | chrl9:15442748-15448102 | chr19:15444797-15444816 | GACCUAGAGGUGUGGGUCUG | + |
| 2064 | 58525 | WIZ | intron_03 | chrl9:15442748-15448102 | chr19:15444772-15444791 | AGGGCAGGUUAUAUGUGAAC | - |
| 2065 | 58525 | WIZ | intron_03 | chrl9:15442748-15448102 | chr19:15444742-15444761 | GAUUUGACUUUUUUCAGGAG | + |
| 2066 | 58525 | WIZ | intron_03 | chrl9:15442748-15448102 | chr19:15444696-15444715 | CUGGCCCAGCCAAG AAACAG | + |
| 2067 | 58525 | WIZ | intron_03 | chrl9:15442748-15448102 | chr19:15444694-15444713 | GCCUGGCCCAGCCA AGAAAC | + |
| 2068 | 58525 | WIZ | intron_03 | chrl9:15442748-15448102 | chr19:15444708-15444727 | UCUCUAGAGCCCCUGUUUCU | - |
| 2069 | 58525 | WIZ | intron_03 | chrl9:15442748-15448102 | chr19:15444704-15444723 | UAGAGCCCCUGUUUCUUGGC | - |
| 2070 | 58525 | WIZ | intron_03 | chrl9:15442748-15448102 | chr19:15444703-15444722 | AGAGCCCCUGUUUCUUGGCU | - |
| 2071 | 58525 | WIZ | intron_03 | chrl9:15442748-15448102 | chr19:15444698-15444717 | CCCUGUUUCUUGGCUGGGCC | - |
| 2072 | 58525 | WIZ | intron_03 | chrl9:15442748-15448102 | chr19:15444662-15444681 | UUGGAGAGGGCGUUCAGAGU | + |
| 2073 | 58525 | WIZ | intron_03 | chrl9:15442748-15448102 | chr19:15444643-15444662 | UGGUUUUAGGAUGGGGGUGU | + |
| 2074 | 58525 | WIZ | intron_03 | chrl9:15442748-15448102 | chr19:15444636-15444655 | CAAGGGCUGGUUUUAGGAUG | + |
| 2075 | 58525 | WIZ | intron_03 | chrl9:15442748-15448102 | chr19:15444592-15444611 | AACCACCAGGAUAC ACUGAU | + |
| 2076 | 58525 | WIZ | intron_03 | chrl9:15442748-15448102 | chr19:15444600-15444619 | UGCUGCCCAUCAGUGUAUCC | - |
| 2077 | 58525 | WIZ | intron_03 | chrl9:15442748-15448102 | chrl9:15444546-15444565 | UACCAAAGUGUCCCCUGGAG | + |
| 2078 | 58525 | WIZ | intron_03 | chrl9:15442748-15448102 | chr19:15444544-15444563 | AUUACCAAAGUGUCCCCUGG | + |
| 2079 | 58525 | WIZ | intron_03 | chrl9:15442748-15448102 | chr19:15444265-15444284 | GGGUGUUGACCAGAAAGGUG | + |
| 2080 | 58525 | WIZ | intron_03 | chrl9:15442748-15448102 | chr19:15444277-15444296 | AGCCAGUGACCACA CCUUUC | - |
| 2081 | 58525 | WIZ | intron_03 | chrl9:15442748-15448102 | chr19:15444237-15444256 | GGAUAAAAGUGGAGGUAGGG | + |
| 2082 | 58525 | WIZ | intron_03 | chrl9:15442748-15448102 | chrl9:15444226-15444245 | UGAGAGUCAAGGGAUAAAAG | + |
| 2083 | 58525 | WIZ | intron_03 | chrl9:15442748-15448102 | chrl9:15444216-15444235 | AGCUGACUGCUGAGAGUCAA | + |
| 2084 | 58525 | WIZ | intron_03 | chr19:15442748-15448102 | chr19:15444215-15444234 | GAGCUGACUGCUGAGAGUCA | + |
| 2085 | 58525 | WIZ | intron_03 | chr19:15442748-15448102 | chr19:15444205-15444224 | CAGUCAGCUCUCAAUUUCUC | - |
| 2086 | 58525 | WIZ | intron_03 | chr19:15442748-15448102 | chr19:15444144-15444163 | CAGAAAAAGGGAUAGGGCUG | + |
| 2087 | 58525 | WIZ | intron_03 | chr19:15442748-15448102 | chr19:15444142-15444161 | UCCAGAAAAAGGGAUAGGGC | + |
| 2088 | 58525 | WIZ | intron_03 | chr19:15442748-15448102 | chr19:15444138-15444157 | AUGGUCCAGAAAAAGGGAUA | + |
| 2089 | 58525 | WIZ | intron_03 | chr19:15442748-15448102 | chr19:15444132-15444151 | UUGAGGAUGGUCCAGAAAAA | + |
| 2090 | 58525 | WIZ | intron_03 | chr19:15442748-15448102 | chr19:15444131-15444150 | UUUGAGGAUGGUCCAGAAAA | + |
| 2091 | 58525 | WIZ | intron_03 | chr19:15442748-15448102 | chr19:15444128-15444147 | UCUGGACCAUCCUCAAAUUG | - |
| 2092 | 58525 | WIZ | intron_03 | chr19:15442748-15448102 | chr19:15444091-15444110 | GCAUCUGUCGGGCUCUGGAC | - |
| 2093 | 58525 | WIZ | intron_03 | chr19:15442748-15448102 | chr19:15444056-15444075 | GGCCAAGGUUAACACACUGG | + |
| 2094 | 58525 | WIZ | intron_03 | chr19:15442748-15448102 | chr19:15444054-15444073 | CGGGCCAAGGUUAACACACU | + |
| 2095 | 58525 | WIZ | intron_03 | chr19:15442748-15448102 | chr19:15444053-15444072 | CCGGGCCAAGGUUAACACAC | + |
| 2096 | 58525 | WIZ | intron_03 | chr19:15442748-15448102 | chr19:15443973-15443992 | GAUGCAGGCCAGGAUUCCUG | - |
| 2097 | 58525 | WIZ | intron_03 | chr19:15442748-15448102 | chr19:15443957-15443976 | CCUGUGGUCGCUCCAGGCAU | - |
| 2098 | 58525 | WIZ | intron_03 | chr19:15442748-15448102 | chr19:15443930-15443949 | ACAGGCGGAUAAUAGAGAGU | - |
| 2099 | 58525 | WIZ | intron_03 | chr19:15442748-15448102 | chr19:15443915-15443934 | AGAGUUGGCUCCAUCUGUGU | - |
| 2100 | 58525 | WIZ | intron_03 | chr19:15442748-15448102 | chr19:15443912-15443931 | GUUGGCUCCAUCUGUGUUGG | - |
| 2101 | 58525 | WIZ | intron_03 | chr19:15442748-15448102 | chr19:15443911-15443930 | UUGGCUCCAUCUGUGUUGGU | - |
| 2102 | 58525 | WIZ | intron_03 | chr19:15442748-15448102 | chr19:15443876-15443895 | CCUGAAAUCCAAUC CCCUCC | + |
| 2103 | 58525 | WIZ | intron_03 | chr19:15442748-15448102 | chr19:15443872-15443891 | GGGAUUGGAUUUCAGGACAU | - |
| 2104 | 58525 | WIZ | intron_03 | chr19:15442748-15448102 | chr19:15443867-15443886 | UGGAUUUCAGGACAUAGGCC | - |
| 2105 | 58525 | WIZ | intron_03 | chr19:15442748-15448102 | chr19:15443747-15443766 | CAGCAUUCUAGCACCUGGCA | + |
| 2106 | 58525 | WIZ | intron_03 | chr19:15442748-15448102 | chr19:15443652-15443671 | AAAUCACCUGGCUCUUUCUU | + |
| 2107 | 58525 | WIZ | intron_03 | chr19:15442748-15448102 | chr19:15443651-15443670 | GAAAUCACCUGGCUCUUUCU | + |
| 2108 | 58525 | WIZ | intron_03 | chr19:15442748-15448102 | chr19:15443513-15443532 | CCUAACUCUUUUGGGCCUCA | + |
| 2109 | 58525 | WIZ | intron_03 | chr19:15442748-15448102 | chr19:15443512-15443531 | ACCUAACUCUUUUGGGCCUC | + |
| 2110 | 58525 | WIZ | intron_03 | chr19:15442748-15448102 | chr19:15443407-15443426 | CUAUGAGGUCAGACCUCUGC | + |
| 2111 | 58525 | WIZ | intron_03 | chr19:15442748-15448102 | chr19:15443025-15443044 | CACCCUGGUAAAAACUCACC | + |
| 2112 | 58525 | WIZ | intron_03 | chr19:15442748-15448102 | chr19:15442934-15442953 | UGGCUCUCCUGGGGGACCCC | + |
| 2113 | 58525 | WIZ | intron_03 | chr19:15442748-15448102 | chr19:15442926-15442945 | AGUCCCCUUGGCUCUCCUGG | + |
| 2114 | 58525 | WIZ | intron_03 | chr19:15442748-15448102 | chr19:15442923-15442942 | AAGAGUCCCCUUGGCUCUCC | + |
| 2115 | 58525 | WIZ | intron_03 | chr19:15442748-15448102 | chr19:15442914-15442933 | UUUCUUUGGAAGAGUCCCCU | + |
| 2116 | 58525 | WIZ | intron_03 | chr19:15442748-15448102 | chr19:15442905-15442924 | UUCCAAAGAAACCC CUUUCA | - |
| 2117 | 58525 | WIZ | intron_03 | chr19:15442748-15448102 | chr19:15442890-15442909 | UGUGGUCCUGAGCCCUGAAA | + |
| 2118 | 58525 | WIZ | intron_03 | chr19:15442748-15448102 | chr19:15442899-15442918 | AGAAACCCCUUUCA GGGCUC | - |
| 2119 | 58525 | WIZ | intron_03 | chr19:15442748-15448102 | chr19:15442872-15442891 | CAGAGGCCACGGGCCUCUCA | - |
| 2120 | 58525 | WIZ | intron_03 | chr19:15442748-15448102 | chr19:15442856-15442875 | UCCCAGUUCCUCUCCCUGAG | + |
| 2121 | 58525 | WIZ | intron_03 | chr19:15442748-15448102 | chr19:15442867-15442886 | GCCACGGGCCUCUCAGGGAG | - |
| 2122 | 58525 | WIZ | intron_03 | chr19:15442748-15448102 | chr19:15442860-15442879 | GCCUCUCAGGGAGAGGAACU | - |
| 2123 | 58525 | WIZ | intron_03 | chr19:15442748-15448102 | chr19:15442827-15442846 | GCCUUUCUGAGGCACCUGGC | - |
| 2124 | 58525 | WIZ | intron_03 | chr19:15442748-15448102 | chr19:15442826-15442845 | CCUUUCUGAGGCACCUGGCA | - |
| 2125 | 58525 | WIZ | intron_03 | chr19:15442748-15448102 | chr19:15442790-15442809 | GGUGUGGAGGGCCCCGGCCA | - |
| 2126 | 58525 | WIZ | intron_03 | chr19:15442748-15448102 | chr19:15442760-15442779 | AGGGGAGACCCUGAGGGGCU | + |
| 2127 | 58525 | WIZ | intron_03 | chr19:15442748-15448102 | chr19:15442740-15442759 | GCUGCCCGUCUGCAACAGAG | + |
| 2128 | 58525 | WIZ | intron_03 | chr19:15442748-15448102 | chr19:15442748-15442767 | UCUCCCCUCUCUGUUGCAGA | - |
| 2129 | 58525 | WIZ | intron_03 | chr19:15442748-15448102 | chr19:15442747-15442766 | CUCCCCUCUCUGUUGCAGAC | - |
| 2130 | 58525 | WIZ | exon_04_c | chr19:15442675-15442748 | chr19:15442717-15442736 | GGCUUCGCUGAGGCCGGGAU | + |
| 2131 | 58525 | WIZ | exon_04_c | chr19:15442675-15442748 | chr19:15442716-15442735 | GGGCUUCGCUGAGGCCGGGA | + |
| 2132 | 58525 | WIZ | exon_04_c | chr19:15442675-15442748 | chr19:15442696-15442715 | GGCGGAGGUGACACGGGGGA | + |
| 2133 | 58525 | WIZ | exon_04_c | chr19:15442675-15442748 | chr19:15442689-15442708 | GAUGGGUGGCGGAGGUGACA | + |
| 2134 | 58525 | WIZ | exon_04_c | chr19:15442675-15442748 | chr19:15442671-15442690 | CUCACCAGCUGCUGAUCCGA | + |
| 2135 | 58525 | WIZ | intron_04 | chr19:15440715-15442675 | chr19:15442663-15442682 | GCAGCUGGUGAGUGCCAUGC | - |
| 2136 | 58525 | WIZ | intron_04 | chr19:15440715-15442675 | chr19:15442618-15442637 | GGGGCAAGCAGGACAUGCCC | - |
| 2137 | 58525 | WIZ | intron_04 | chr19:15440715-15442675 | chr19:15442598-15442617 | CAGGGGCUUAUCUGAGGCCU | + |
| 2138 | 58525 | WIZ | intron_04 | chr19:15440715-15442675 | chr19:15442598-15442617 | AGGCCUCAGAUAAGCCCCUG | - |
| 2139 | 58525 | WIZ | intron_04 | chr19:15440715-15442675 | chr19:15442581-15442600 | GUCCCCUUCUCAUUCCCCAG | + |
| 2140 | 58525 | WIZ | intron_04 | chr19:15440715-15442675 | chr19:15442586-15442605 | AGCCCCUGGGGAAUGAGAAG | - |
| 2141 | 58525 | WIZ | intron_04 | chr19:15440715-15442675 | chr19:15442535-15442554 | AGGAGGAGUCAGCUCCCGGC | - |
| 2142 | 58525 | WIZ | intron_04 | chr19:15440715-15442675 | chr19:15442517-15442536 | ACGCCCAGGGGCUUGCCUGC | + |
| 2143 | 58525 | WIZ | intron_04 | chr19:15440715-15442675 | chr19:15442513-15442532 | GCAAGCCCCUGGGCGUGUGC | - |
| 2144 | 58525 | WIZ | intron_04 | chr19:15440715-15442675 | chr19:15442512-15442531 | CAAGCCCCUGGGCGUGUGCU | - |
| 2145 | 58525 | WIZ | intron_04 | chr19:15440715-15442675 | chr19:15442506-15442525 | CCUGGGCGUGUGCUGGGGUU | - |
| 2146 | 58525 | WIZ | intron_04 | chr19:15440715-15442675 | chr19:15442285-15442304 | CAAUGCCCCUUGGAUCCUCA | + |
| 2147 | 58525 | WIZ | intron_04 | chr19:15440715-15442675 | chr19:15442275-15442294 | UGCUCUCACCCAAUGCCCCU | + |
| 2148 | 58525 | WIZ | intron_04 | chr19:15440715-15442675 | chr19:15442228-15442247 | AAGCCAUUUAAUAAAGAGUA | + |
| 2149 | 58525 | WIZ | intron_04 | chr19:15440715-15442675 | chr19:15442229-15442248 | CUACUCUUUAUUAAAUGGCU | - |
| 2150 | 58525 | WIZ | intron_04 | chr19:15440715-15442675 | chr19:15441889-15441908 | AAACUUACUAUGACCUGGCC | + |
| 2151 | 58525 | WIZ | intron_04 | chr19:15440715-15442675 | chr19:15441773-15441792 | GGCUGUGGCAAGGAUUCAGU | + |
| 2152 | 58525 | WIZ | intron_04 | chr19:15440715-15442675 | chr19:15441695-15441714 | GAUGUUGGGUGGAGACCAUA | + |
| 2153 | 58525 | WIZ | intron_04 | chr19:15440715-15442675 | chr19:15441627-15441646 | UCAAGAUCCUGCCUCCAUCA | + |
| 2154 | 58525 | WIZ | intron_04 | chr19:15440715-15442675 | chr19:15441641-15441660 | UGAUUGGCAUCCCCUGAUGG | - |
| 2155 | 58525 | WIZ | intron_04 | chr19:15440715-15442675 | chr19:15441620-15441639 | GGCAGGAUCUUGAAAAGGAA | - |
| 2156 | 58525 | WIZ | intron_04 | chr19:15440715-15442675 | chr19:15441579-15441598 | UCAUAAUAAGAACCCACACU | - |
| 2157 | 58525 | WIZ | intron_04 | chr19:15440715-15442675 | chr19:15441553-15441572 | GCUUUGUUUCACCUCAUGCC | + |
| 2158 | 58525 | WIZ | intron_04 | chr19:15440715-15442675 | chr19:15441510-15441529 | CAUCUUCACCCUAC ACCCUG | - |
| 2159 | 58525 | WIZ | intron_04 | chr19:15440715-15442675 | chr19:15441509-15441528 | AUCUUCACCCUACA CCCUGC | - |
| 2160 | 58525 | WIZ | intron_04 | chr19:15440715-15442675 | chr19:15441491-15441510 | GCGGGGUCAUUGAAAGGUUG | - |
| 2161 | 58525 | WIZ | intron_04 | chr19:15440715-15442675 | chr19:15441393-15441412 | AGAUGUUGUAUAAGGACAAA | - |
| 2162 | 58525 | WIZ | intron_04 | chr19:15440715-15442675 | chr19:15441346-15441365 | UUUUCCAAUCCUGAAAUUGG | + |
| 2163 | 58525 | WIZ | intron_04 | chr19:15440715-15442675 | chr19:15441344-15441363 | AGUUUUCCAAUCCUGAAAUU | + |
| 2164 | 58525 | WIZ | intron_04 | chr19:15440715-15442675 | chr19:15441317-15441336 | GGAGGCAAGGUAACCACUCU | + |
| 2165 | 58525 | WIZ | intron_04 | chr19:15440715-15442675 | chr19:15441316-15441335 | GGGAGGCAAGGUAACCACUC | + |
| 2166 | 58525 | WIZ | intron_04 | chr19:15440715-15442675 | chr19:15441282-15441301 | ACCUUCUUGGGCAGAGGGGU | + |
| 2167 | 58525 | WIZ | intron_04 | chr19:15440715-15442675 | chr19:15441276-15441295 | AUCCUGACCUUCUUGGGCAG | + |
| 2168 | 58525 | WIZ | intron_04 | chr19:15440715-15442675 | chr19:15441270-15441289 | CCAGUGAUCCUGACCUUCUU | + |
| 2169 | 58525 | WIZ | intron_04 | chr19:15440715-15442675 | chr19:15441245-15441264 | GAAGGUCCCUGCUAAGCCUU | + |
| 2170 | 58525 | WIZ | intron_04 | chr19:15440715-15442675 | chr19:15441217-15441236 | CUGACUCUGCCUUUCUGGAG | - |
| 2171 | 58525 | WIZ | intron_04 | chr19:15440715-15442675 | chr19:15441168-15441187 | UUUGUGGCAGAACAGUUCAA | + |
| 2172 | 58525 | WIZ | intron_04 | chr19:15440715-15442675 | chr19:15441110-15441129 | AGCAAAAUCACCCC AGUUUG | - |
| 2173 | 58525 | WIZ | intron_04 | chr19:15440715-15442675 | chr19:15441055-15441074 | UGAGAGGCUUGGGUCCUCCC | - |
| 2174 | 58525 | WIZ | intron_04 | chr19:15440715-15442675 | chr19:15441053-15441072 | AGAGGCUUGGGUCCUCCCUG | - |
| 2175 | 58525 | WIZ | intron_04 | chr19:15440715-15442675 | chr19:15441035-15441054 | UCAACUCUCAUCUCUCCCCA | + |
| 2176 | 58525 | WIZ | intron_04 | chr19:15440715-15442675 | chr19:15441003-15441022 | GUGGCCACCUCUAAGAAGUC | + |
| 2177 | 58525 | WIZ | intron_04 | chr19:15440715-15442675 | chr19:15441013-15441032 | GUUGCCACCAGACUUCUUAG | - |
| 2178 | 58525 | WIZ | intron_04 | chr19:15440715-15442675 | chr19:15441010-15441029 | GCCACCAGACUUCUUAGAGG | - |
| 2179 | 58525 | WIZ | intron_04 | chr19:15440715-15442675 | chr19:15440978-15440997 | GACCACCCCUGGGC CACACG | + |
| 2180 | 58525 | WIZ | intron_04 | chr19:15440715-15442675 | chr19:15440988-15441007 | GCCACAUCCCCGUG UGGCCC | - |
| 2181 | 58525 | WIZ | intron_04 | chr19:15440715-15442675 | chr19:15440983-15441002 | AUCCCCGUGUGGCCCAGGGG | - |
| 2182 | 58525 | WIZ | intron_04 | chr19:15440715-15442675 | chr19:15440954-15440973 | UACAUUCCCCCACA AUGCAG | - |
| 2183 | 58525 | WIZ | intron_04 | chr19:15440715-15442675 | chr19:15440947-15440966 | CCCCACAAUGCAGC GGGGCU | - |
| 2184 | 58525 | WIZ | intron_04 | chr19:15440715-15442675 | chr19:15440934-15440953 | CGGGGCUAGGCUUUGUGGAC | - |
| 2185 | 58525 | WIZ | intron_04 | chr19:15440715-15442675 | chr19:15440923-15440942 | UUUGUGGACAGGUGCAUCCU | - |
| 2186 | 58525 | WIZ | intron_04 | chr19:15440715-15442675 | chr19:15440826-15440845 | CCGAGGGUGACAGGGGUGUG | + |
| 2187 | 58525 | WIZ | intron_04 | chr19:15440715-15442675 | chr19:15440751-15440770 | GGGCUGCAGUUUUCCUUCCU | + |
| 2188 | 58525 | WIZ | intron_04 | chr19:15440715-15442675 | chr19:15440730-15440749 | CAAUGGGGACAGGUUAGCCA | + |
| 2189 | 58525 | WIZ | exon_05_c | chr19:15438577-15440715 | chr19:15440684-15440703 | AGGCAGCCUGGACUUCCGGC | - |
| 2190 | 58525 | WIZ | exon_05_c | chr19:15438577-15440715 | chr19:15440646-15440665 | UGGGAAAUGGCCCAGGAGAU | + |
| 2191 | 58525 | WIZ | exon_05_c | chr19:15438577-15440715 | chr19:15440647-15440666 | CAUCUCCUGGGCCAUUUCCC | - |
| 2192 | 58525 | WIZ | exon_05_c | chr19:15438577-15440715 | chr19:15440618-15440637 | CCCAGGGCCCCCGG CCAUCA | + |
| 2193 | 58525 | WIZ | exon_05_c | chr19:15438577-15440715 | chr19:15440622-15440641 | CCCCUGAUGGCCGGGGGCCC | - |
| 2194 | 58525 | WIZ | exon_05_c | chr19:15438577-15440715 | chr19:15440621-15440640 | CCCUGAUGGCCGGGGGCCCU | - |
| 2195 | 58525 | WIZ | exon_05_c | chr19:15438577-15440715 | chr19:15440602-15440621 | UGGACAAGGGGGUGCUCCCA | + |
| 2196 | 58525 | WIZ | exon_05_c | chr19:15438577-15440715 | chr19:15440601-15440620 | CUGGACAAGGGGGUGCUCCC | + |
| 2197 | 58525 | WIZ | exon_05_c | chr19:15438577-15440715 | chr19:15440590-15440609 | UCCCCAGCCUCCUG GACAAG | + |
| 2198 | 58525 | WIZ | exon_05_c | chr19:15438577-15440715 | chr19:15440595-15440614 | ACCCCCUUGUCCAG GAGGCU | - |
| 2199 | 58525 | WIZ | exon_05_c | chr19:15438577-15440715 | chr19:15440512-15440531 | GAGCCCUCUAGCUCAGCGUG | + |
| 2200 | 58525 | WIZ | exon_05_c | chr19:15438577-15440715 | chr19:15440511-15440530 | AGAGCCCUCUAGCUCAGCGU | + |
| 2201 | 58525 | WIZ | exon_05_c | chr19:15438577-15440715 | chr19:15440510-15440529 | UAGAGCCCUCUAGCUCAGCG | + |
| 2202 | 58525 | WIZ | exon_05_c | chr19:15438577-15440715 | chr19:15440474-15440493 | AAAGCCUUGGUUCCCCCCGG | + |
| 2203 | 58525 | WIZ | exon_05_c | chr19:15438577-15440715 | chr19:15440481-15440500 | UACACCACCGGGGGGAACCA | - |
| 2204 | 58525 | WIZ | exon_05_c | chr19:15438577-15440715 | chr19:15440427-15440446 | AUCUUGGAGCCAGUCGAACC | + |
| 2205 | 58525 | WIZ | exon_05_c | chr19:15438577-15440715 | chr19:15440416-15440435 | CUCCAAGAUGAGGACGAGCA | - |
| 2206 | 58525 | WIZ | exon_05_c | chr19:15438577-15440715 | chr19:15440388-15440407 | GUGCAGCCCUGCGUCCUGGG | + |
| 2207 | 58525 | WIZ | exon_05_c | chr19:15438577-15440715 | chr19:15440398-15440417 | CAGGGAUCCCCCCA GGACGC | - |
| 2208 | 58525 | WIZ | exon_05_c | chr19:15438577-15440715 | chr19:15440341-15440360 | ACCCUCCUGAAGGGGGCGAG | + |
| 2209 | 58525 | WIZ | exon_05_c | chr19:15438577-15440715 | chr19:15440349-15440368 | CGCCACCCCUCGCC CCCUUC | - |
| 2210 | 58525 | WIZ | exon_05_c | chr19:15438577-15440715 | chr19:15440267-15440286 | CAGAGAAGAUCUGGAGGACC | - |
| 2211 | 58525 | WIZ | exon_05_c | chr19:15438577-15440715 | chr19:15440264-15440283 | AGAAGAUCUGGAGGACCUGG | - |
| 2212 | 58525 | WIZ | exon_05_c | chr19:15438577-15440715 | chr19:15440219-15440238 | GGGCCUACCCACGUCAGCCU | - |
| 2213 | 58525 | WIZ | exon_05_c | chr19:15438577-15440715 | chr19:15440187-15440206 | GUUCACUGUCCAGGUCUGUG | + |
| 2214 | 58525 | WIZ | exon_05_c | chr19:15438577-15440715 | chr19:15440186-15440205 | ACAGACCUGGACAGUGAACU | - |
| 2215 | 58525 | WIZ | exon_05_c | chr19:15438577-15440715 | chr19:15440183-15440202 | GACCUGGACAGUGAACUCGG | - |
| 2216 | 58525 | WIZ | exon_05_c | chr19:15438577-15440715 | chr19:15440109-15440128 | CUCCAGCAGCUCAC ACAGGU | + |
| 2217 | 58525 | WIZ | exon_05_c | chr19:15438577-15440715 | chr19:15440105-15440124 | CCUCCUCCAGCAGC UCACAC | + |
| 2218 | 58525 | WIZ | exon_05_c | chr19:15438577-15440715 | chr19:15440111-15440130 | CUACCUGUGUGAGCUGCUGG | - |
| 2219 | 58525 | WIZ | exon_05_c | chr19:15438577-15440715 | chr19:15440079-15440098 | AUCUGGGCUGGCCACCCCUU | + |
| 2220 | 58525 | WIZ | exon_05_c | chr19:15438577-15440715 | chr19:15440067-15440086 | GUCCUCGUCCUCAUCUGGGC | + |
| 2221 | 58525 | WIZ | exon_05_c | chr19:15438577-15440715 | chr19:15440072-15440091 | GGCCAGCCCAGAUGAGGACG | - |
| 2222 | 58525 | WIZ | exon_05_c | chr19:15438577-15440715 | chr19:15440015-15440034 | CAGCAUCUACUUCAAGCAGA | - |
| 2223 | 58525 | WIZ | exon_05_c | chr19:15438577-15440715 | chr19:15439982-15440001 | GGUGCUGGCUCAUGUGCUCC | + |
| 2224 | 58525 | WIZ | exon_05_c | chr19:15438577-15440715 | chr19:15439953-15439972 | CGCAGGGGGCUCCUGGCCCG | + |
| 2225 | 58525 | WIZ | exon_05_c | chr19:15438577-15440715 | chr19:15439939-15439958 | AGCGGGGCCAGGUCCGCAGG | + |
| 2226 | 58525 | WIZ | exon_05_c | chr19:15438577-15440715 | chr19:15439940-15439959 | CCCUGCGGACCUGGCCCCGC | - |
| 2227 | 58525 | WIZ | exon_05_c | chr19:15438577-15440715 | chr19:15439922-15439941 | CACACUCCCCGCAG GCCAGC | + |
| 2228 | 58525 | WIZ | exon_05_c | chr19:15438577-15440715 | chr19:15439871-15439890 | GCAGCACCGGCAGC UGCAUC | - |
| 2229 | 58525 | WIZ | exon_05_c | chr19:15438577-15440715 | chr19:15439819-15439838 | CAAAAGCUGAAGCAAGUUCC | - |
| 2230 | 58525 | WIZ | exon_05_c | chr19:15438577-15440715 | chr19:15439798-15439817 | GCCUCCCGGCCCUC GUCUCC | + |
| 2231 | 58525 | WIZ | exon_05_c | chr19:15438577-15440715 | chr19:15439805-15439824 | AGUUCCAGGAGACGAGGGCC | - |
| 2232 | 58525 | WIZ | exon_05_c | chr19:15438577-15440715 | chr19:15439784-15439803 | GGCACUGCAGCCGUGCCUCC | + |
| 2233 | 58525 | WIZ | exon_05_c | chr19:15438577-15440715 | chr19:15439763-15439782 | UGGUGCCAAAGACACACUUA | + |
| 2234 | 58525 | WIZ | exon_05_c | chr19:15438577-15440715 | chr19:15439771-15439790 | CAGUGCCCUAAGUGUGUCUU | - |
| 2235 | 58525 | WIZ | exon_05_c | chr19:15438577-15440715 | chr19:15439754-15439773 | CUUUGGCACCAAUUCAUCCA | - |
| 2236 | 58525 | WIZ | exon_05_c | chr19:15438577-15440715 | chr19:15439687-15439706 | CAGACCACCAAAGA GCCUUU | - |
| 2237 | 58525 | WIZ | exon_05_c | chr19:15438577-15440715 | chr19:15439669-15439688 | GCCCCGCUGCUGCC UCCAAA | + |
| 2238 | 58525 | WIZ | exon_05_c | chr19:15438577-15440715 | chr19:15439640-15439659 | GGGCGCUGGCCUCAGGGCUG | + |
| 2239 | 58525 | WIZ | exon_05_c | chr19:15438577-15440715 | chr19:15439620-15439639 | UCCGUAGGGCUGAUAGAGGA | + |
| 2240 | 58525 | WIZ | exon_05_c | chr19:15438577-15440715 | chr19:15439616-15439635 | CAGCUCCGUAGGGCUGAUAG | + |
| 2241 | 58525 | WIZ | exon_05_c | chr19:15438577-15440715 | chr19:15439606-15439625 | AGGCCAACGGCAGCUCCGUA | + |
| 2242 | 58525 | WIZ | exon_05_c | chr19:15438577-15440715 | chr19:15439612-15439631 | CAGCCCUACGGAGC UGCCGU | - |
| 2243 | 58525 | WIZ | exon_05_c | chr19:15438577-15440715 | chr19:15439558-15439577 | AGCAGGCUCUCGCUGGGCGC | + |
| 2244 | 58525 | WIZ | exon_05_c | chr19:15438577-15440715 | chr19:15439557-15439576 | GAGCAGGCUCUCGCUGGGCG | + |
| 2245 | 58525 | WIZ | exon_05_c | chr19:15438577-15440715 | chr19:15439541-15439560 | GCUCAGGGAGCACGUGAGGC | - |
| 2246 | 58525 | WIZ | exon_05_c | chr19:15438577-15440715 | chr19:15439509-15439528 | AUCCUCCUCCCAGU GGGGAU | + |
| 2247 | 58525 | WIZ | exon_05_c | chr19:15438577-15440715 | chr19:15439521-15439540 | UGGUGCAUGCCCAUCCCCAC | - |
| 2248 | 58525 | WIZ | exon_05_c | chr19:15438577-15440715 | chr19:15439520-15439539 | GGUGCAUGCCCAUCCCCACU | - |
| 2249 | 58525 | WIZ | exon_05_c | chr19:15438577-15440715 | chr19:15439517-15439536 | GCAUGCCCAUCCCC ACUGGG | - |
| 2250 | 58525 | WIZ | exon_05_c | chr19:15438577-15440715 | chr19:15439505-15439524 | CCACUGGGAGGAGGAUGGCG | - |
| 2251 | 58525 | WIZ | exon_05_c | chr19:15438577-15440715 | chr19:15439457-15439476 | CAUCCUGGCUAGUGCCUGGC | + |
| 2252 | 58525 | WIZ | exon_05_c | chr19:15438577-15440715 | chr19:15439400-15439419 | UGGCAAAGCUGAGCCGUCCU | - |
| 2253 | 58525 | WIZ | exon_05_c | chr19:15438577-15440715 | chr19:15439384-15439403 | CGCCACAUGGGGGCCAAGGA | + |
| 2254 | 58525 | WIZ | exon_05_c | chr19:15438577-15440715 | chr19:15439380-15439399 | CUCCCGCCACAUGG GGGCCA | + |
| 2255 | 58525 | WIZ | exon_05_c | chr19:15438577-15440715 | chr19:15439389-15439408 | AGCCGUCCUUGGCCCCCAUG | - |
| 2256 | 58525 | WIZ | exon_05_c | chr19:15438577-15440715 | chr19:15439385-15439404 | GUCCUUGGCCCCCAUGUGGC | - |
| 2257 | 58525 | WIZ | exon_05_c | chr19:15438577-15440715 | chr19:15439372-15439391 | AUGUGGCGGGAGAACCCUGC | - |
| 2258 | 58525 | WIZ | exon_05_c | chr19:15438577-15440715 | chr19:15439355-15439374 | GGCUGGGGUCGUAUCCAGCA | + |
| 2259 | 58525 | WIZ | exon_05_c | chr19:15438577-15440715 | chr19:15439354-15439373 | AGGCUGGGGUCGUAUCCAGC | + |
| 2260 | 58525 | WIZ | exon_05_c | chr19:15438577-15440715 | chr19:15439334-15439353 | GGCAUCCUGGGCCAAAGGCC | + |
| 2261 | 58525 | WIZ | exon_05_c | chr19:15438577-15440715 | chr19:15439348-15439367 | UACGACCCCAGCCU GGCCUU | - |
| 2262 | 58525 | WIZ | exon_05_c | chr19:15438577-15440715 | chr19:15439329-15439348 | CUGCUGGCAUCCUGGGCCAA | + |
| 2263 | 58525 | WIZ | exon_05_c | chr19:15438577-15440715 | chr19:15439313-15439332 | AAUCUCUGAUGCUCAGCUGC | + |
| 2264 | 58525 | WIZ | exon_05_c | chr19:15438577-15440715 | chr19:15439288-15439307 | UGCAGGAGUGGCUUUGACAG | + |
| 2265 | 58525 | WIZ | exon_05_c | chr19:15438577-15440715 | chr19:15439276-15439295 | UGGCCCGUGCCAUGCAGGAG | + |
| 2266 | 58525 | WIZ | exon_05_c | chr19:15438577-15440715 | chr19:15439282-15439301 | AAGCCACUCCUGCA UGGCAC | - |
| 2267 | 58525 | WIZ | exon_05_c | chr19:15438577-15440715 | chr19:15439259-15439278 | CCAGAGGCCUCUCGGAAGGC | - |
| 2268 | 58525 | WIZ | exon_05_c | chr19:15438577-15440715 | chr19:15439212-15439231 | GAGCUGUAAGGAGUAGGGGG | + |
| 2269 | 58525 | WIZ | exon_05_c | chr19:15438577-15440715 | chr19:15439208-15439227 | UCCCGAGCUGUAAGGAGUAG | + |
| 2270 | 58525 | WIZ | exon_05_c | chr19:15438577-15440715 | chr19:15439212-15439231 | CCCCCUACUCCUUA CAGCUC | - |
| 2271 | 58525 | WIZ | exon_05_c | chr19:15438577-15440715 | chr19:15439166-15439185 | UCCGUUCCCCCAGC CCUUGU | + |
| 2272 | 58525 | WIZ | exon_05_c | chr19:15438577-15440715 | chr19:15439165-15439184 | CUCCGUUCCCCCAG CCCUUG | + |
| 2273 | 58525 | WIZ | exon_05_c | chr19:15438577-15440715 | chr19:15439176-15439195 | CCGUCCACCCACAA GGGCUG | - |
| 2274 | 58525 | WIZ | exon_05_c | chr19:15438577-15440715 | chr19:15439100-15439119 | UGUAGUGCUGACCUCCGAGA | - |
| 2275 | 58525 | WIZ | exon_05_c | chr19:15438577-15440715 | chr19:15439044-15439063 | GAUGAGGCUGGGGGUGGCUA | + |
| 2276 | 58525 | WIZ | exon_05_c | chr19:15438577-15440715 | chr19:15439034-15439053 | CCGCCUGCGGGAUGAGGCUG | + |
| 2277 | 58525 | WIZ | exon_05_c | chr19:15438577-15440715 | chr19:15439037-15439056 | CCCCAGCCUCAUCC CGCAGG | - |
| 2278 | 58525 | WIZ | exon_05_c | chr19:15438577-15440715 | chr19:15438981-15439000 | GGUGGCCUCUACUGCCUGCA | + |
| 2279 | 58525 | WIZ | exon_05_c | chr19:15438577-15440715 | chr19:15438980-15438999 | GGGUGGCCUCUACUGCCUGC | + |
| 2280 | 58525 | WIZ | exon_05_c | chr19:15438577-15440715 | chr19:15438989-15439008 | AGAGGCCCUGCAGGCAGUAG | - |
| 2281 | 58525 | WIZ | exon_05_c | chr19:15438577-15440715 | chr19:15438978-15438997 | AGGCAGUAGAGGCCACCCAG | - |
| 2282 | 58525 | WIZ | exon_05_c | chr19:15438577-15440715 | chr19:15438924-15438943 | CAGCUUCGCCACGA GCACAA | + |
| 2283 | 58525 | WIZ | exon_05_c | chr19:15438577-15440715 | chr19:15438924-15438943 | UUGUGCUCGUGGCGAAGCUG | - |
| 2284 | 58525 | WIZ | exon_05_c | chr19:15438577-15440715 | chr19:15438917-15438936 | CGUGGCGAAGCUGGGGCCGC | - |
| 2285 | 58525 | WIZ | exon_05_c | chr19:15438577-15440715 | chr19:15438911-15438930 | GAAGCUGGGGCCGCAGGUCA | - |
| 2286 | 58525 | WIZ | exon_05_c | chr19:15438577-15440715 | chr19:15438908-15438927 | GCUGGGGCCGCAGGUCAUGG | - |
| 2287 | 58525 | WIZ | exon_05_c | chr19:15438577-15440715 | chr19:15438888-15438907 | CGGCAGCCAGGGUGCCCCCA | - |
| 2288 | 58525 | WIZ | exon_05_c | chr19:15438577-15440715 | chr19:15438868-15438887 | AGCUCCUCGGGCUGCAACCU | + |
| 2289 | 58525 | WIZ | exon_05_c | chr19:15438577-15440715 | chr19:15438869-15438888 | AAGGUUGCAGCCCGAGGAGC | - |
| 2290 | 58525 | WIZ | exon_05_c | chr19:15438577-15440715 | chr19:15438845-15438864 | GCUGGCAGGCGCCCACCCCC | - |
| 2291 | 58525 | WIZ | exon_05_c | chr19:15438577-15440715 | chr19:15438787-15438806 | AGGAGUGUGUCCAGCCCCAG | + |
| 2292 | 58525 | WIZ | exon_05_c | chr19:15438577-15440715 | chr19:15438782-15438801 | GCUGGACACACUCC UGGAUG | - |
| 2293 | 58525 | WIZ | exon_05_c | chr19:15438577-15440715 | chr19:15438776-15438795 | CACACUCCUGGAUGGGGAUC | - |
| 2294 | 58525 | WIZ | exon_05_c | chr19:15438577-15440715 | chr19:15438750-15438769 | CUCCUCGUGCUUCAGUGCCA | + |
| 2295 | 58525 | WIZ | exon_05_c | chr19:15438577-15440715 | chr19:15438755-15438774 | GGCCAUGGCACUGAAGCACG | - |
| 2296 | 58525 | WIZ | exon_05_c | chr19:15438577-15440715 | chr19:15438750-15438769 | UGGCACUGAAGCACGAGGAG | - |
| 2297 | 58525 | WIZ | exon_05_c | chr19:15438577-15440715 | chr19:15438698-15438717 | UGGCCAAGCCGAUGCCGUUG | + |
| 2298 | 58525 | WIZ | exon_05_c | chr19:15438577-15440715 | chr19:15438623-15438642 | CAUCUCCGCUGAGGAGGUGA | - |
| 2299 | 58525 | WIZ | intron_05 | chr19:15437129-15438577 | chr19:15438557-15438576 | UAGGGCAGCUUCACUUUUAA | - |
| 2300 | 58525 | WIZ | intron_05 | chr19:15437129-15438577 | chr19:15438531-15438550 | UGCCCAGCCAUGUGUCUCCU | + |
| 2301 | 58525 | WIZ | intron_05 | chr19:15437129-15438577 | chr19:15438536-15438555 | GGCCCAGGAGACACAUGGCU | - |
| 2302 | 58525 | WIZ | intron_05 | chr19:15437129-15438577 | chr19:15438489-15438508 | CUCCCUUAGCGCCA AGCAGG | - |
| 2303 | 58525 | WIZ | intron_05 | chr19:15437129-15438577 | chr19:15438454-15438473 | CUCAAGUCUCUCAGGAGCAG | + |
| 2304 | 58525 | WIZ | intron_05 | chr19:15437129-15438577 | chr19:15438435-15438454 | GAGCCACAGUGAAGGCCACC | - |
| 2305 | 58525 | WIZ | intron_05 | chr19:15437129-15438577 | chr19:15438428-15438447 | AGUGAAGGCCACCUGGUCGG | - |
| 2306 | 58525 | WIZ | intron_05 | chr19:15437129-15438577 | chr19:15438375-15438394 | CCUUCCUCCAGUGGCUGGAA | + |
| 2307 | 58525 | WIZ | intron_05 | chr19:15437129-15438577 | chr19:15438366-15438385 | ACCCACACUCCUUC CUCCAG | + |
| 2308 | 58525 | WIZ | intron_05 | chr19:15437129-15438577 | chr19:15438370-15438389 | GCCACUGGAGGAAGGAGUGU | - |
| 2309 | 58525 | WIZ | intron_05 | chr19:15437129-15438577 | chr19:15438273-15438292 | CCCCAGGUCCCCAG AACAGA | + |
| 2310 | 58525 | WIZ | intron_05 | chr19:15437129-15438577 | chr19:15438196-15438215 | GGAGGGGGUCCCACCACUCC | + |
| 2311 | 58525 | WIZ | intron_05 | chr19:15437129-15438577 | chr19:15438149-15438168 | ACCUUACAGGCAGCCCCAGG | + |
| 2312 | 58525 | WIZ | intron_05 | chr19:15437129-15438577 | chr19:15438147-15438166 | AAACCUUACAGGCAGCCCCA | + |
| 2313 | 58525 | WIZ | intron_05 | chr19:15437129-15438577 | chr19:15438153-15438172 | ACCCCCUGGGGCUGCCUGUA | - |
| 2314 | 58525 | WIZ | intron_05 | chr19:15437129-15438577 | chr19:15438136-15438155 | UGGGAACUGACAAACCUUAC | + |
| 2315 | 58525 | WIZ | intron_05 | chr19:15437129-15438577 | chr19:15438095-15438114 | UCCUGUUGGAAACAGACUUC | + |
| 2316 | 58525 | WIZ | intron_05 | chr19:15437129-15438577 | chr19: 15438099-15438118 | UCCAGAAGUCUGUUUCCAAC | - |
| 2317 | 58525 | WIZ | intron_05 | chr19:15437129-15438577 | chr19:15438081-15438100 | ACCACCCAGGGUGC UCCUGU | + |
| 2318 | 58525 | WIZ | intron_05 | chr19:15437129-15438577 | chr19:15438068-15438087 | UGCCAAUGUCAGAACCACCC | + |
| 2319 | 58525 | WIZ | intron_05 | chr19:15437129-15438577 | chr19:15438051-15438070 | GCAGACACAAAGCC CACUUG | - |
| 2320 | 58525 | WIZ | intron_05 | chr19:15437129-15438577 | chr19:15438048-15438067 | GACACAAAGCCCAC UUGGGG | - |
| 2321 | 58525 | WIZ | intron_05 | chr19:15437129-15438577 | chr19:15437972-15437991 | CGCACUAGGGGUUGGGGGCA | - |
| 2322 | 58525 | WIZ | intron_05 | chr19:15437129-15438577 | chr19:15437971-15437990 | GCACUAGGGGUUGGGGGCAA | - |
| 2323 | 58525 | WIZ | intron_05 | chr19:15437129-15438577 | chr19:15437970-15437989 | CACUAGGGGUUGGGGGCAAG | - |
| 2324 | 58525 | WIZ | intron_05 | chr19:15437129-15438577 | chr19:15437913-15437932 | GUGAGCAGGGCUGAGAUGCG | - |
| 2325 | 58525 | WIZ | intron_05 | chr19:15437129-15438577 | chr19:15437892-15437911 | GGAAAGCUGGGAGAACCAGG | - |
| 2326 | 58525 | WIZ | intron_05 | chr19:15437129-15438577 | chr19:15437844-15437863 | UGAGCCCUGCAACUGGAGUU | + |
| 2327 | 58525 | WIZ | intron_05 | chr19:15437129-15438577 | chr19:15437852-15437871 | AAGUCCCUAACUCC AGUUGC | - |
| 2328 | 58525 | WIZ | intron_05 | chr19:15437129-15438577 | chr19:15437811-15437830 | AUGGAUGUAAUGCCCUCUGC | + |
| 2329 | 58525 | WIZ | intron_05 | chr19:15437129-15438577 | chr19:15437772-15437791 | GCUGUAAAUUAAAUAUUUGU | + |
| 2330 | 58525 | WIZ | intron_05 | chr19:15437129-15438577 | chr19:15437708-15437727 | UCAAAUACUCUCAUAGAUGA | - |
| 2331 | 58525 | WIZ | intron_05 | chr19:15437129-15438577 | chr19:15437704-15437723 | AUACUCUCAUAGAUGAUGGC | - |
| 2332 | 58525 | WIZ | intron_05 | chr19:15437129-15438577 | chr19:15437332-15437351 | UCCUUGACGUUGCCAGAUGU | - |
| 2333 | 58525 | WIZ | intron_05 | chr19:15437129-15438577 | chr19:15437308-15437327 | AGGGGGUAUCUGGGAGGGUC | - |
| 2334 | 58525 | WIZ | intron_05 | chr19:15437129-15438577 | chr19:15437294-15437313 | AGGGUCAGGCUUCCUGGAAU | - |
| 2335 | 58525 | WIZ | intron_05 | chr19:15437129-15438577 | chr19:15437233-15437252 | GGAGCAAAAGGGACAGCCAC | - |
| 2336 | 58525 | WIZ | intron_05 | chr19:15437129-15438577 | chr19:15437232-15437251 | GAGCAAAAGGGACAGCCACG | - |
| 2337 | 58525 | WIZ | intron_05 | chr19:15437129-15438577 | chr19:15437214-15437233 | UGGACUGCCUUUCUUCCCCG | + |
| 2338 | 58525 | WIZ | intron_05 | chr19:15437129-15438577 | chr19:15437224-15437243 | GGGACAGCCACGGGGAAGAA | - |
| 2339 | 58525 | WIZ | intron_05 | chr19:15437129-15438577 | chr19:15437214-15437233 | CGGGGAAGAAAGGCAGUCCA | - |
| 2340 | 58525 | WIZ | intron_05 | chr19:15437129-15438577 | chr19:15437183-15437202 | CCAACCCCUCCCCA UAUUCA | + |
| 2341 | 58525 | WIZ | intron_05 | chr19:15437129-15438577 | chr19:15437185-15437204 | CCUGAAUAUGGGGAGGGGUU | - |
| 2342 | 58525 | WIZ | intron_05 | chr19:15437129-15438577 | chr19:15437184-15437203 | CUGAAUAUGGGGAGGGGUUG | - |
| 2343 | 58525 | WIZ | exon_06_c.1 | chr19:15436933-15437129 | chr19:15437104-15437123 | GAAGGUGCCUGGGUCAAAGU | + |
| 2344 | 58525 | WIZ | exon_06_c.1 | chr19:15436933-15437129 | chr19:15437080-15437099 | UGAUGCGCUGUGACUUCUGC | - |
| 2345 | 58525 | WIZ | exon_06_c.1 | chr19:15436933-15437129 | chr19:15437061-15437080 | CGGGGCUGGCUUCGACACAC | - |
| 2346 | 58525 | WIZ | exon_06_c.1 | chr19:15436933-15437129 | chr19:15437031-15437050 | GGGCCCGGGCGUGGCUGGAG | + |
| 2347 | 58525 | WIZ | exon_06_c.1 | chr19:15436933-15437129 | chr19:15437017-15437036 | GAAGUCACGUAGGUGGGCCC | + |
| 2348 | 58525 | WIZ | exon_06_c.1 | chr19:15436933-15437129 | chr19:15437007-15437026 | UGGUGAUACCGAAGUCACGU | + |
| 2349 | 58525 | WIZ | exon_06_c.1 | chr19:15436933-15437129 | chr19: 15436987-15437006 | UGAGACAGUGAGCUCCCAGU | + |
| 2350 | 58525 | WIZ | exon_06_c.2 | chr19:15436805-15436933 | chr19:15436916-15436935 | UCUCGGCCCAGGGGGCUGGG | + |
| 2351 | 58525 | WIZ | exon_06_c.2 | chr19:15436805-15436933 | chr19: 15436913-15436932 | GGCUCUCGGCCCAGGGGGCU | + |
| 2352 | 58525 | WIZ | exon_06_c.2 | chr19:15436805-15436933 | chr19: 15436906-15436925 | ACCCCCAGGCUCUC GGCCCA | + |
| 2353 | 58525 | WIZ | exon_06_c.2 | chr19:15436805-15436933 | chr19:15436911-15436930 | CCCCCUGGGCCGAG AGCCUG | - |
| 2354 | 58525 | WIZ | exon_06_c.2 | chr19:15436805-15436933 | chr19:15436892-15436911 | AAGCUGCCAGGCGGACCCCC | + |
| 2355 | 58525 | WIZ | exon_06_c.2 | chr19:15436805-15436933 | chr19: 15436823-15436842 | CCAGGGUCCUCAGCCCAGGU | + |
| 2356 | 58525 | WIZ | exon_06_c.2 | chr19:15436805-15436933 | chr19:15436822-15436841 | CCCAGGGUCCUCAGCCCAGG | + |
| 2357 | 58525 | WIZ | exon_06_c.2 | chr19:15436805-15436933 | chr19: 15436805-15436824 | CCAUCUCCAUAGGCUGGCCC | + |
| 2358 | 58525 | WIZ | intron_06 | chr19:15433290-15436805 | chr19:15436801-15436820 | CAGCCUAUGGAGAUGGUAAG | - |
| 2359 | 58525 | WIZ | intron_06 | chr19:15433290-15436805 | chr19:15436798-15436817 | CCUAUGGAGAUGGUAAGGGG | - |
| 2360 | 58525 | WIZ | intron_06 | chr19:15433290-15436805 | chr19:15436797-15436816 | CUAUGGAGAUGGUAAGGGGA | - |
| 2361 | 58525 | WIZ | intron_06 | chr19:15433290-15436805 | chr19:15436764-15436783 | GCUGGAGCCCCAUCCUUCCC | - |
| 2362 | 58525 | WIZ | intron_06 | chr19:15433290-15436805 | chr19:15436744-15436763 | AGGGGCCCAGAGCAUUGGAG | - |
| 2363 | 58525 | WIZ | intron_06 | chr19:15433290-15436805 | chr19:15436741-15436760 | GGCCCAGAGCAUUGGAGGGG | - |
| 2364 | 58525 | WIZ | intron_06 | chr19:15433290-15436805 | chr19:15436739-15436758 | CCCAGAGCAUUGGAGGGGCG | - |
| 2365 | 58525 | WIZ | intron_06 | chr19:15433290-15436805 | chr19:15436710-15436729 | GGGCAGCCGCUCAGCUUUCC | - |
| 2366 | 58525 | WIZ | intron_06 | chr19:15433290-15436805 | chr19:15436644-15436663 | UAAAUAGCAGGGUGGUUGUA | + |
| 2367 | 58525 | WIZ | intron_06 | chr19:15433290-15436805 | chr19:15436632-15436651 | AGAAAGGACACCUAAAUAGC | + |
| 2368 | 58525 | WIZ | intron_06 | chr19:15433290-15436805 | chr19: 15436645-15436664 | UUACAACCACCCUG CUAUUU | - |
| 2369 | 58525 | WIZ | intron_06 | chr19:15433290-15436805 | chr19:15436616-15436635 | AGAUCCUGAGUGAAACAGAA | + |
| 2370 | 58525 | WIZ | intron_06 | chr19:15433290-15436805 | chr19: 15436623-15436642 | GUGUCCUUUCUGUUUCACUC | - |
| 2371 | 58525 | WIZ | intron_06 | chr19:15433290-15436805 | chr19: 15436553-15436572 | CAUUUGUCAAAGUCACUGGC | + |
| 2372 | 58525 | WIZ | intron_06 | chr19:15433290-15436805 | chr19: 15436320-15436339 | UCAUUAACAGCAAAGAAUCU | + |
| 2373 | 58525 | WIZ | intron_06 | chr19:15433290-15436805 | chr19: 15436319-15436338 | GUCAUUAACAGCAAAGAAUC | + |
| 2374 | 58525 | WIZ | intron_06 | chr19:15433290-15436805 | chr19: 15435825-15435844 | AAAAAUCUAGCCUCUAGGCU | + |
| 2375 | 58525 | WIZ | intron_06 | chr19:15433290-15436805 | chr19:15435532-15435551 | UGGUUGAAAAUCUAGACUCU | + |
| 2376 | 58525 | WIZ | intron_06 | chr19:15433290-15436805 | chr19: 15435518-15435537 | CAACCAAUGUUUGCUUUAUC | - |
| 2377 | 58525 | WIZ | intron_06 | chr19:15433290-15436805 | chr19: 15435306-15435325 | AAAAUCUUAGUACAGGGGCC | + |
| 2378 | 58525 | WIZ | intron_06 | chr19:15433290-15436805 | chr19: 15435300-15435319 | CACGUUAAAAUCUUAGUACA | + |
| 2379 | 58525 | WIZ | intron_06 | chr19:15433290-15436805 | chr19: 15435299-15435318 | ACACGUUAAAAUCUUAGUAC | + |
| 2380 | 58525 | WIZ | intron_06 | chr19:15433290-15436805 | chr19:15434936-15434955 | AAACAGGGACAUGGCCGGUG | + |
| 2381 | 58525 | WIZ | intron_06 | chr19:15433290-15436805 | chr19: 15434899-15434918 | GUGGCAAAGAAGAUGACCUA | + |
| 2382 | 58525 | WIZ | intron_06 | chr19:15433290-15436805 | chr19:15434837-15434856 | GUGGUGUCUCUAGUGGAGGA | - |
| 2383 | 58525 | WIZ | intron_06 | chr19:15433290-15436805 | chr19:15434802-15434821 | CCUUCACCAAAUAG GACUUA | + |
| 2384 | 58525 | WIZ | intron_06 | chr19:15433290-15436805 | chr19:15434794-15434813 | CCUGGGCUCCUUCACCAAAU | + |
| 2385 | 58525 | WIZ | intron_06 | chr19:15433290-15436805 | chr19:15434777-15434796 | CCUUUGCAGUGCCCAGUCCU | + |
| 2386 | 58525 | WIZ | intron_06 | chr19:15433290-15436805 | chr19:15434763-15434782 | CAAAGGGAGUGGACAAGUGA | - |
| 2387 | 58525 | WIZ | intron_06 | chr19:15433290-15436805 | chr19:15434735-15434754 | AAAGCCAGGCUGUGCAAGAC | + |
| 2388 | 58525 | WIZ | intron_06 | chr19:15433290-15436805 | chr19: 15434705-15434724 | CCAAGUUCUCUGCCUUGUAA | + |
| 2389 | 58525 | WIZ | intron_06 | chr19:15433290-15436805 | chr19:15434708-15434727 | CCUUUACAAGGCAGAGAACU | - |
| 2390 | 58525 | WIZ | intron_06 | chr19:15433290-15436805 | chr19:15434691-15434710 | ACUUGGCUACAAAAAGUAGU | - |
| 2391 | 58525 | WIZ | intron_06 | chr19:15433290-15436805 | chr19:15434690-15434709 | CUUGGCUACAAAAAGUAGUU | - |
| 2392 | 58525 | WIZ | intron_06 | chr19:15433290-15436805 | chr19: 15434658-15434677 | AUGGAGAGUGUCUGAACAGG | - |
| 2393 | 58525 | WIZ | intron_06 | chr19:15433290-15436805 | chr19:15434646-15434665 | UGAACAGGGGGUAUCGCCCC | - |
| 2394 | 58525 | WIZ | intron_06 | chr19:15433290-15436805 | chr19:15433962-15433981 | AGUACCGAAGGGGCCGGGUG | + |
| 2395 | 58525 | WIZ | intron_06 | chr19:15433290-15436805 | chr19:15433951-15433970 | CAAGUAGGAAUAGUACCGAA | + |
| 2396 | 58525 | WIZ | intron_06 | chr19:15433290-15436805 | chr19:15433936-15433955 | GGACCCCAGCAGCU GCAAGU | + |
| 2397 | 58525 | WIZ | intron_06 | chr19:15433290-15436805 | chr19:15433942-15433961 | AUUCCUACUUGCAGCUGCUG | - |
| 2398 | 58525 | WIZ | intron_06 | chr19:15433290-15436805 | chr19:15433862-15433881 | GGCAUUCAUGAGCCUGCAAA | - |
| 2399 | 58525 | WIZ | intron_06 | chr19:15433290-15436805 | chr19:15433861-15433880 | GCAUUCAUGAGCCUGCAAAG | - |
| 2400 | 58525 | WIZ | intron_06 | chr19:15433290-15436805 | chr19:15433857-15433876 | UCAUGAGCCUGCAAAGGGGA | - |
| 2401 | 58525 | WIZ | intron_06 | chr19:15433290-15436805 | chr19: 15433853-15433872 | GAGCCUGCAAAGGGGAGGGU | - |
| 2402 | 58525 | WIZ | intron_06 | chr19:15433290-15436805 | chr19:15433817-15433836 | UCUGAACCUCCAAGGAGAGG | + |
| 2403 | 58525 | WIZ | intron_06 | chr19:15433290-15436805 | chr19:15433816-15433835 | CUCUGAACCUCCAA GGAGAG | + |
| 2404 | 58525 | WIZ | intron_06 | chr19:15433290-15436805 | chr19: 15433829-15433848 | CUAUCAAAGCCCCC UCUCCU | - |
| 2405 | 58525 | WIZ | intron_06 | chr19:15433290-15436805 | chr19:15433815-15433834 | UCUCUGAACCUCCAAGGAGA | + |
| 2406 | 58525 | WIZ | intron_06 | chr19:15433290-15436805 | chr19:15433706-15433725 | CGUGGGUGAGCUGAGUGCCU | + |
| 2407 | 58525 | WIZ | intron_06 | chr19:15433290-15436805 | chr19: 15433687-15433706 | GUCUGGCUUGUAGUGUCUCA | - |
| 2408 | 58525 | WIZ | intron_06 | chr19:15433290-15436805 | chr19: 15433683-15433702 | GGCUUGUAGUGUCUCAGGGG | - |
| 2409 | 58525 | WIZ | intron_06 | chr19:15433290-15436805 | chr19: 15433666-15433685 | GGGUGGCUGCGAGACAGAGC | - |
| 2410 | 58525 | WIZ | intron_06 | chr19:15433290-15436805 | chr19: 15433658-15433677 | GCGAGACAGAGCUGGCUCUG | - |
| 2411 | 58525 | WIZ | intron_06 | chr19:15433290-15436805 | chr19: 15433631-15433650 | CUAGGGGUGCAGGAGGCACU | - |
| 2412 | 58525 | WIZ | intron_06 | chr19:15433290-15436805 | chr19: 15433579-15433598 | AGCCAGGUUUGGCACUGCCC | - |
| 2413 | 58525 | WIZ | intron_06 | chr19:15433290-15436805 | chr19: 15433559-15433578 | CCCUCCCAAGGACA AGGCCA | + |
| 2414 | 58525 | WIZ | intron_06 | chr19:15433290-15436805 | chr19: 15433553-15433572 | AGCUCUCCCUCCCA AGGACA | + |
| 2415 | 58525 | WIZ | intron_06 | chr19:15433290-15436805 | chr19:15433547-15433566 | GGUCAUAGCUCUCCCUCCCA | + |
| 2416 | 58525 | WIZ | intron_06 | chr19:15433290-15436805 | chr19: 15433519-15433538 | AGUGAAUAACUGCGAGGCAG | - |
| 2417 | 58525 | WIZ | intron_06 | chr19:15433290-15436805 | chr19: 15433506-15433525 | GAGGCAGAGGGUUGGCGGUU | - |
| 2418 | 58525 | WIZ | intron_06 | chr19:15433290-15436805 | chr19: 15433505-15433524 | AGGCAGAGGGUUGGCGGUUA | - |
| 2419 | 58525 | WIZ | intron_06 | chr19:15433290-15436805 | chr19:15433451-15433470 | AUGUUGCAUAUCCUUACUUA | + |
| 2420 | 58525 | WIZ | intron_06 | chr19:15433290-15436805 | chr19: 15433465-15433484 | UGGAAGCCUUGCCUUAAGUA | - |
| 2421 | 58525 | WIZ | intron_06 | chr19:15433290-15436805 | chr19: 15433439-15433458 | UGCAACAUUAGGGCUAGGUC | - |
| 2422 | 58525 | WIZ | intron_06 | chr19:15433290-15436805 | chr19:15433422-15433441 | GUCUGGGCACUGGCGCUGCA | - |
| 2423 | 58525 | WIZ | intron_06 | chr19:15433290-15436805 | chr19: 15433383-15433402 | CCCACUUAGGGAGAGGGGGC | + |
| 2424 | 58525 | WIZ | intron_06 | chr19:15433290-15436805 | chr19:15433377-15433396 | CUCCUGCCCACUUA GGGAGA | + |
| 2425 | 58525 | WIZ | intron_06 | chr19:15433290-15436805 | chr19:15433376-15433395 | CCUCCUGCCCACUU AGGGAG | + |
| 2426 | 58525 | WIZ | intron_06 | chr19:15433290-15436805 | chr19: 15433387-15433406 | GCCUGCCCCCUCUC CCUAAG | - |
| 2427 | 58525 | WIZ | intron_06 | chr19:15433290-15436805 | chr19:15433379-15433398 | CCUCUCCCUAAGUGGGCAGG | - |
| 2428 | 58525 | WIZ | intron_06 | chr19:15433290-15436805 | chr19:15433373-15433392 | CCUAAGUGGGCAGGAGGGGG | - |
| 2429 | 58525 | WIZ | intron_06 | chr19:15433290-15436805 | chr19:15433372-15433391 | CUAAGUGGGCAGGAGGGGGC | - |
| 2430 | 58525 | WIZ | intron_06 | chr19:15433290-15436805 | chr19: 15433359-15433378 | AGGGGGCGGGUGCCAGGUUG | - |
| 2431 | 58525 | WIZ | intron_06 | chr19:15433290-15436805 | chr19: 15433354-15433373 | GCGGGUGCCAGGUUGGGGGC | - |
| 2432 | 58525 | WIZ | intron_06 | chr19:15433290-15436805 | chr19: 15433353-15433372 | CGGGUGCCAGGUUGGGGGCG | - |
| 2433 | 58525 | WIZ | intron_06 | chr19:15433290-15436805 | chr19: 15433305-15433324 | CCAGCUGUUCCUUGACAGUU | + |
| 2434 | 58525 | WIZ | intron_06 | chr19:15433290-15436805 | chr19: 15433307-15433326 | CCAACUGUCAAGGAACAGCU | - |
| 2435 | 58525 | WIZ | intron_06 | chr19:15433290-15436805 | chr19: 15433306-15433325 | CAACUGUCAAGGAACAGCUG | - |
| 2436 | 58525 | WIZ | exon 07 nc | chr19:15433164-15433290 | chr19:15433282-15433301 | CAAUCGGAGAGAGAAGCAGG | - |
| 2437 | 58525 | WIZ | exon 07 nc | chr19:15433164-15433290 | chr19:15433252-15433271 | AAUGUGUUGCCGGCCUUGUG | - |
| 2438 | 58525 | WIZ | exon 07 nc | chr19:15433164-15433290 | chr19: 15433236-15433255 | CAGACCUAGGGAACCCCACA | + |
| 2439 | 58525 | WIZ | exon 07 nc | chr19:15433164-15433290 | chr19: 15433231-15433250 | GGUUCCCUAGGUCUGCGGAA | - |
| 2440 | 58525 | WIZ | intron 07 | chr19:15432761-15433164 | chr19:15433126-15433145 | ACUCGGAGAUGGAGACUUUC | - |
| 2441 | 58525 | WIZ | intron 07 | chr19:15432761-15433164 | chr19:15433104-15433123 | ACCCUGCCCCAUUC CCUUUC | + |
| 2442 | 58525 | WIZ | intron 07 | chr19:15432761-15433164 | chr19:15433096-15433115 | AUGGGGCAGGGUCCUAGGGC | - |
| 2443 | 58525 | WIZ | intron 07 | chr19:15432761-15433164 | chr19: 15433058-15433077 | AAAACUCUUAAGAGCCCCGA | + |
| 2444 | 58525 | WIZ | intron 07 | chr19:15432761-15433164 | chr19:15433047-15433066 | AAGAGUUUUGACGUUGUUUA | - |
| 2445 | 58525 | WIZ | intron 07 | chr19:15432761-15433164 | chr19:15433046-15433065 | AGAGUUUUGACGUUGUUUAA | - |
| 2446 | 58525 | WIZ | intron 07 | chr19:15432761-15433164 | chr19:15433044-15433063 | AGUUUUGACGUUGUUUAAGG | - |
| 2447 | 58525 | WIZ | intron 07 | chr19:15432761-15433164 | chr19: 15433033-15433052 | UGUUUAAGGGGGUCUGAGUG | - |
| 2448 | 58525 | WIZ | intron 07 | chr19:15432761-15433164 | chr19: 15432996-15433015 | GGACAUCUCUAUCCCUAGGA | + |
| 2449 | 58525 | WIZ | intron 07 | chr19:15432761-15433164 | chr19: 15432985-15433004 | GAGAUGUCCGGGGACUGGGC | - |
| 2450 | 58525 | WIZ | intron 07 | chr19:15432761-15433164 | chr19: 15432980-15432999 | GUCCGGGGACUGGGCUGGGG | - |
| 2451 | 58525 | WIZ | intron 07 | chr19:15432761-15433164 | chr19:15432970-15432989 | UGGGCUGGGGCGGCGGUUAG | - |
| 2452 | 58525 | WIZ | intron 07 | chr19:15432761-15433164 | chr19: 15432963-15432982 | GGGCGGCGGUUAGAGGCCGC | - |
| 2453 | 58525 | WIZ | intron 07 | chr19:15432761-15433164 | chr19: 15432944-15432963 | CACCCACGCUGGGC GCCCAG | + |
| 2454 | 58525 | WIZ | intron 07 | chr19:15432761-15433164 | chr19:15432950-15432969 | AGGCCGCUGGGCGCCCAGCG | - |
| 2455 | 58525 | WIZ | intron 07 | chr19:15432761-15433164 | chr19: 15432949-15432968 | GGCCGCUGGGCGCCCAGCGU | - |
| 2456 | 58525 | WIZ | intron 07 | chr19:15432761-15433164 | chr19: 15432891-15432910 | GGGCGGACGGCUGCAGCUGC | + |
| 2457 | 58525 | WIZ | intron 07 | chr19:15432761-15433164 | chr19:15432878-15432897 | GUCUGGGCCCUGAGGGCGGA | + |
| 2458 | 58525 | WIZ | intron 07 | chr19:15432761-15433164 | chr19: 15432874-15432893 | GUUCGUCUGGGCCCUGAGGG | + |
| 2459 | 58525 | WIZ | intron 07 | chr19:15432761-15433164 | chr19:15432831-15432850 | CUCGGCGCUCGGCACUCGGC | - |
| 2460 | 58525 | WIZ | intron 07 | chr19:15432761-15433164 | chr19: 15432821-15432840 | GGCACUCGGCAGGCCAACCU | - |
| 2461 | 58525 | WIZ | exon_08_nc.1 | chr19:15432556-15432761 | chr19:15432738-15432757 | GGCGCUCAGCUGCUCCCGCC | - |
| 2462 | 58525 | WIZ | exon_08_nc.1 | chr19:15432556-15432761 | chr19:15432693-15432712 | GGAGGCGGCCAUCUUGGCUC | + |
| 2463 | 58525 | WIZ | exon_08_nc.1 | chr19:15432556-15432761 | chr19:15432678-15432697 | UCGGCACUGGGCGGUGGAGG | + |
| 2464 | 58525 | WIZ | exon_08_nc.1 | chr19:15432556-15432761 | chr19:15432666-15432685 | CGCUUUUGUCACUCGGCACU | + |
| 2465 | 58525 | WIZ | exon_08_nc.1 | chr19:15432556-15432761 | chr19:15432668-15432687 | CCAGUGCCGAGUGACAAAAG | - |
| 2466 | 58525 | WIZ | exon_08_nc .1 | chr19:15432556-15432761 | chr19:15432592-15432611 | CUGGGCGGGGGCGCCCCCGC | + |
| 2467 | 58525 | WIZ | exon_08_nc .1 | chr19:15432556-15432761 | chr19: 15432567-15432586 | UGCCGCGGGGCCCGGGCUCG | + |
| 2468 | 58525 | WIZ | exon_08_nc .2 | chr19:15432433-15432556 | chr19:15432478-15432497 | GCCUUGGGCCCGUCCCGCGG | + |
| 2469 | 58525 | WIZ | exon_08_nc .2 | chr19:15432433-15432556 | chr19:15432473-15432492 | GGACGGGCCCAAGGCCGAGC | - |
| 2470 | 58525 | WIZ | exon_08_nc .2 | chr19:15432433-15432556 | chr19: 15432421-15432440 | CGCGGGCUCUUACCGGGCGC | + |
| 2471 | 58525 | WIZ | exon_08_nc .2 | chr19:15432433-15432556 | chr19: 15432420-15432439 | GCGCGGGCUCUUACCGGGCG | + |
| 2472 | 58525 | WIZ | intron_08 | chr19:15431182-15432433 | chr19:15432404-15432423 | CCCCACACCCUCCC AAGCGC | + |
| 2473 | 58525 | WIZ | intron_08 | chr19:15431182-15432433 | chr19: 15432407-15432426 | CCCGCGCUUGGGAGGGUGUG | - |
| 2474 | 58525 | WIZ | intron_08 | chr19:15431182-15432433 | chr19:15432342-15432361 | GCAGACUGGACGGAAGGCGU | + |
| 2475 | 58525 | WIZ | intron_08 | chr19:15431182-15432433 | chr19:15432332-15432351 | GGGGGGUCCCGCAGACUGGA | + |
| 2476 | 58525 | WIZ | intron_08 | chr19:15431182-15432433 | chr19: 15432328-15432347 | GAGGGGGGGGUCCCGCAGAC | + |
| 2477 | 58525 | WIZ | intron_08 | chr19:15431182-15432433 | chr19: 15432312-15432331 | ACUAAAGGGCCUGGGGGAGG | + |
| 2478 | 58525 | WIZ | intron_08 | chr19:15431182-15432433 | chr19: 15432310-15432329 | CAACUAAAGGGCCUGGGGGA | + |
| 2479 | 58525 | WIZ | intron_08 | chr19:15431182-15432433 | chr19: 15432324-15432343 | GCGGGACCCCCCCC UCCCCC | - |
| 2480 | 58525 | WIZ | intron_08 | chr19:15431182-15432433 | chr19: 15432309-15432328 | ACAACUAAAGGGCCUGGGGG | + |
| 2481 | 58525 | WIZ | intron_08 | chr19:15431182-15432433 | chr19: 15432304-15432323 | CCCACACAACUAAA GGGCCU | + |
| 2482 | 58525 | WIZ | intron_08 | chr19:15431182-15432433 | chr19: 15432303-15432322 | GCCCACACAACUAA AGGGCC | + |
| 2483 | 58525 | WIZ | intron_08 | chr19:15431182-15432433 | chr19: 15432297-15432316 | CCCUGGGCCCACAC AACUAA | + |
| 2484 | 58525 | WIZ | intron_08 | chr19:15431182-15432433 | chr19:15432308-15432327 | CCCCAGGCCCUUUA GUUGUG | - |
| 2485 | 58525 | WIZ | intron_08 | chr19:15431182-15432433 | chr19:15432307-15432326 | CCCAGGCCCUUUAGUUGUGU | - |
| 2486 | 58525 | WIZ | intron_08 | chr19:15431182-15432433 | chr19:15432300-15432319 | CCUUUAGUUGUGUGGGCCCA | - |
| 2487 | 58525 | WIZ | intron_08 | chr19:15431182-15432433 | chr19:15432274-15432293 | ACCCUGCGAGCGGCGACAGA | + |
| 2488 | 58525 | WIZ | intron_08 | chr19:15431182-15432433 | chr19:15432278-15432297 | GCCUUCUGUCGCCGCUCGCA | - |
| 2489 | 58525 | WIZ | intron_08 | chr19:15431182-15432433 | chr19:15432250-15432269 | GGAGGAGUGUUUCUGAGGCC | + |
| 2490 | 58525 | WIZ | intron_08 | chr19:15431182-15432433 | chr19:15432245-15432264 | GCGGCGGAGGAGUGUUUCUG | + |
| 2491 | 58525 | WIZ | intron_08 | chr19:15431182-15432433 | chr19:15432190-15432209 | CGGGGCUCCAAAGGGGGCAA | + |
| 2492 | 58525 | WIZ | intron_08 | chr19:15431182-15432433 | chr19:15432184-15432203 | CGCUCCCGGGGCUCCAAAGG | + |
| 2493 | 58525 | WIZ | intron_08 | chr19:15431182-15432433 | chr19:15432191-15432210 | CUUGCCCCCUUUGGAGCCCC | - |
| 2494 | 58525 | WIZ | intron_08 | chr19:15431182-15432433 | chr19:15432168-15432187 | AGCGUCCCUUGCCACGGUUC | - |
| 2495 | 58525 | WIZ | intron_08 | chr19:15431182-15432433 | chr19:15432083-15432102 | AGGACUUUGUCAAAGUCUCC | + |
| 2496 | 58525 | WIZ | intron_08 | chr19:15431182-15432433 | chr19:15432082-15432101 | GAGGACUUUGUCAAAGUCUC | + |
| 2497 | 58525 | WIZ | intron_08 | chr19:15431182-15432433 | chr19:15432083-15432102 | GGAGACUUUGACAAAGUCCU | - |
| 2498 | 58525 | WIZ | intron_08 | chr19:15431182-15432433 | chr19:15432040-15432059 | GUCUCGCAGAAGCAAAGAGU | + |
| 2499 | 58525 | WIZ | intron_08 | chr19:15431182-15432433 | chr19:15431989-15432008 | CAGUGGGAUGUAACGGGGCA | + |
| 2500 | 58525 | WIZ | intron_08 | chr19:15431182-15432433 | chr19:15431988-15432007 | UCAGUGGGAUGUAACGGGGC | + |
| 2501 | 58525 | WIZ | intron_08 | chr19:15431182-15432433 | chr19:15431982-15432001 | AGGCGUUCAGUGGGAUGUAA | + |
| 2502 | 58525 | WIZ | intron_08 | chr19:15431182-15432433 | chr19:15431973-15431992 | GGGCCUUGGAGGCGUUCAGU | + |
| 2503 | 58525 | WIZ | intron_08 | chr19:15431182-15432433 | chr19:15431972-15431991 | GGGGCCUUGGAGGCGUUCAG | + |
| 2504 | 58525 | WIZ | intron_08 | chr19:15431182-15432433 | chr19:15431979-15431998 | CAUCCCACUGAACG CCUCCA | - |
| 2505 | 58525 | WIZ | intron_08 | chr19:15431182-15432433 | chr19:15431883-15431902 | UUCACGUCUAGUUGUUCAAA | + |
| 2506 | 58525 | WIZ | intron_08 | chr19:15431182-15432433 | chr19:15431873-15431892 | UAGACGUGAAAAUUCACCCU | - |
| 2507 | 58525 | WIZ | intron_08 | chr19:15431182-15432433 | chr19:15431845-15431864 | GGUGAGGAGUGUGUGGCAGA | + |
| 2508 | 58525 | WIZ | intron_08 | chr19:15431182-15432433 | chr19:15431829-15431848 | GCCCGCAGCAUCCC UGGGUG | + |
| 2509 | 58525 | WIZ | intron_08 | chr19:15431182-15432433 | chr19:15431834-15431853 | CUCCUCACCCAGGG AUGCUG | - |
| 2510 | 58525 | WIZ | intron_08 | chr19:15431182-15432433 | chr19:15431751-15431770 | CACCUACAGCUAUC UGACUU | + |
| 2511 | 58525 | WIZ | intron_08 | chr19:15431182-15432433 | chr19:15431722-15431741 | GCUGGGCCCUAAGUGGGGUA | + |
| 2512 | 58525 | WIZ | intron_08 | chr19:15431182-15432433 | chr19:15431732-15431751 | GCAGACACCUUACC CCACUU | - |
| 2513 | 58525 | WIZ | intron_08 | chr19:15431182-15432433 | chr19:15431731-15431750 | CAGACACCUUACCC CACUUA | - |
| 2514 | 58525 | WIZ | intron_08 | chr19:15431182-15432433 | chr19:15431685-15431704 | AGACAAUGGGGGACCAGGGG | + |
| 2515 | 58525 | WIZ | intron_08 | chr19:15431182-15432433 | chr19:15431681-15431700 | GCAGAGACAAUGGGGGACCA | + |
| 2516 | 58525 | WIZ | intron_08 | chr19:15431182-15432433 | chr19:15431680-15431699 | UGCAGAGACAAUGGGGGACC | + |
| 2517 | 58525 | \WIZ | intron_08 | chr19:15431182-15432433 | chr19:15431656-15431675 | UCCACCAGACAAGA CAGCUG | + |
| 2518 | 58525 | WIZ | intron_08 | chr19:15431182-15432433 | chr19:15431655-15431674 | CUCCACCAGACAAG ACAGCU | + |
| 2519 | 58525 | WIZ | intron_08 | chr19:15431182-15432433 | chr19:15431663-15431682 | GCAGCCCCAGCUGUCUUGUC | - |
| 2520 | 58525 | WIZ | intron_08 | chr19:15431182-15432433 | chr19:15431629-15431648 | GUGGCUUCACAGCACUUGUG | + |
| 2521 | 58525 | WIZ | intron_08 | chr19:15431182-15432433 | chr19:15431549-15431568 | GGGAAUUCAACACAACACCA | + |
| 2522 | 58525 | WIZ | intron_08 | chr19:15431182-15432433 | chr19:15431508-15431527 | GUCUGCCUGUCUCGAGGGUG | + |
| 2523 | 58525 | WIZ | intron_08 | chr19:15431182-15432433 | chr19:15431481-15431500 | CUCUGGGCAGAACUUGUGAG | + |
| 2524 | 58525 | WIZ | intron_08 | chr19:15431182-15432433 | chr19:15431459-15431478 | AUCUUUUCUUUGAGAUCCCC | - |
| 2525 | 58525 | WIZ | intron_08 | chr19:15431182-15432433 | chr19:15431458-15431477 | UCUUUUCUUUGAGAUCCCCU | - |
| 2526 | 58525 | WIZ | intron_08 | chr19:15431182-15432433 | chr19:15431454-15431473 | UUCUUUGAGAUCCCCUGGGA | - |
| 2527 | 58525 | WIZ | intron_08 | chr19:15431182-15432433 | chr19:15431453-15431472 | UCUUUGAGAUCCCCUGGGAU | - |
| 2528 | 58525 | WIZ | intron_08 | chr19:15431182-15432433 | chr19:15431446-15431465 | GAUCCCCUGGGAUGGGAGUU | - |
| 2529 | 58525 | WIZ | intron_08 | chr19:15431182-15432433 | chr19:15431401-15431420 | ACUACAGCAUGGACAGGUCU | + |
| 2530 | 58525 | WIZ | intron_08 | chr19:15431182-15432433 | chr19:15431395-15431414 | CCACACACUACAGC AUGGAC | + |
| 2531 | 58525 | WIZ | intron_08 | chr19:15431182-15432433 | chr19:15431390-15431409 | UGCUUCCACACACUACAGCA | + |
| 2532 | 58525 | WIZ | intron_08 | chr19:15431182-15432433 | chr19:15431398-15431417 | CCUGUCCAUGCUGUAGUGUG | - |
| 2533 | 58525 | WIZ | intron_08 | chr19:15431182-15432433 | chr19:15431369-15431388 | CUGCUGGCGUCUGCUGUCAG | - |
| 2534 | 58525 | WIZ | intron_08 | chr19:15431182-15432433 | chr19:15431341-15431360 | UCAGUGUCCCUGCACUGGAC | - |
| 2535 | 58525 | WIZ | intron_08 | chr19:15431182-15432433 | chr19:15431335-15431354 | UCCCUGCACUGGACUGGUGC | - |
| 2536 | 58525 | WIZ | intron_08 | chr19:15431182-15432433 | chr19:15431334-15431353 | CCCUGCACUGGACUGGUGCU | - |
| 2537 | 58525 | WIZ | intron_08 | chr19:15431182-15432433 | chr19:15431332-15431351 | CUGCACUGGACUGGUGCUGG | - |
| 2538 | 58525 | WIZ | intron_08 | chr19:15431182-15432433 | chr19:15431306-15431325 | UGGUGGAACCUCAGCUUUCC | - |
| 2539 | 58525 | WIZ | intron_08 | chr19:15431182-15432433 | chr19:15431305-15431324 | GGUGGAACCUCAGCUUUCCU | - |
| 2540 | 58525 | WIZ | intron_08 | chr19:15431182-15432433 | chr19:15431304-15431323 | GUGGAACCUCAGCUUUCCUG | - |
| 2541 | 58525 | WIZ | intron_08 | chr19:15431182-15432433 | chr19:15431256-15431275 | GACAUCAAGGAUAAGGAAGA | - |
| 2542 | 58525 | WIZ | intron_08 | chr19:15431182-15432433 | chr19:15431238-15431257 | GAAGGCCAUCUUCUUAGUUC | - |
| 2543 | 58525 | WIZ | intron_08 | chr19:15431182-15432433 | chr19:15431237-15431256 | AAGGCCAUCUUCUUAGUUCU | - |
| 2544 | 58525 | WIZ | intron_08 | chr19:15431182-15432433 | chr19:15431202-15431221 | GCUCAGCCCAGACA AAUUUC | + |
| 2545 | 58525 | WIZ | intron_08 | chr19:15431182-15432433 | chr19:15431212-15431231 | UAGACAGCCUGAAAUUUGUC | - |
| 2546 | 58525 | WIZ | intron_08 | chr19:15431182-15432433 | chr19:15431211-15431230 | AGACAGCCUGAAAUUUGUCU | - |
| 2547 | 58525 | WIZ | intron_08 | chr19:15431182-15432433 | chr19:15431172-15431191 | AGAACCCAGGCCUGUGGGUU | + |
| 2548 | 58525 | WIZ | intron_08 | chr19:15431182-15432433 | chr19:15431185-15431204 | AGCCUGUCUCCCCA ACCCAC | - |
| 2549 | 58525 | WIZ | exon_09_c.3 | chr19:15431011-15431150 | chr19:15431144-15431163 | CGCAAUGGUGGCCAUGGACU | - |
| 2550 | 58525 | WIZ | exon_09_c.3 | chr19:15431011-15431150 | chr19:15431113-15431132 | AGGCUCUUCUUAGGGAGCGA | + |
| 2551 | 58525 | WIZ | intron_09 | chr19:15430089-15431011 | chr19:15431001-15431020 | ACCUCAAGGGUGAGUGGCCC | - |
| 2552 | 58525 | WIZ | intron_09 | chr19:15430089-15431011 | chr19:15430980-15430999 | GCAUCCCCUGCCAU GCCACC | + |
| 2553 | 58525 | WIZ | intron_09 | chr19:15430089-15431011 | chr19:15430988-15431007 | GUGGCCCAGGUGGCAUGGCA | - |
| 2554 | 58525 | WIZ | intron_09 | chr19:15430089-15431011 | chr19:15430987-15431006 | UGGCCCAGGUGGCAUGGCAG | - |
| 2555 | 58525 | WIZ | intron_09 | chr19:15430089-15431011 | chr19:15430954-15430973 | UCCUGUGAGUGUAACCAGCC | + |
| 2556 | 58525 | WIZ | intron_09 | chr19:15430089-15431011 | chr19:15430958-15430977 | GCCAGGCUGGUUACACUCAC | - |
| 2557 | 58525 | WIZ | intron_09 | chr19:15430089-15431011 | chr19:15430939-15430958 | CAGGAGCACUCUCGUGCCUU | - |
| 2558 | 58525 | WIZ | intron_09 | chr19:15430089-15431011 | chr19:15430927-15430946 | CGUGCCUUGGGGUUAAUGUG | - |
| 2559 | 58525 | WIZ | intron_09 | chr19:15430089-15431011 | chr19:15430920-15430939 | UGGGGUUAAUGUGGGGCCCA | - |
| 2560 | 58525 | WIZ | intron_09 | chr19:15430089-15431011 | chr19:15430891-15430910 | GGUGCCAGAGGGAAAACUGC | + |
| 2561 | 58525 | WIZ | intron_09 | chr19:15430089-15431011 | chr19:15430880-15430899 | UGGUGCCUCAAGGUGCCAGA | + |
| 2562 | 58525 | WIZ | intron_09 | chr19:15430089-15431011 | chr19:15430880-15430899 | UCUGGCACCUUGAGGCACCA | - |
| 2563 | 58525 | WIZ | intron_09 | chr19:15430089-15431011 | chr19:15430837-15430856 | CUCUUGAACUUCUACUGUCC | - |
| 2564 | 58525 | WIZ | intron_09 | chr19:15430089-15431011 | chr19:15430804-15430823 | CCCUGAGCUGCACC CUCACG | - |
| 2565 | 58525 | WIZ | intron_09 | chr19:15430089-15431011 | chr19:15430789-15430808 | UGCUGUCCCUCGCCCCGUGA | + |
| 2566 | 58525 | WIZ | intron_09 | chr19:15430089-15431011 | chr19:15430799-15430818 | AGCUGCACCCUCAC GGGGCG | - |
| 2567 | 58525 | WIZ | intron_09 | chr19:15430089-15431011 | chr19:15430765-15430784 | ACCACCACACCCAC UGCUUC | + |
| 2568 | 58525 | WIZ | intron_09 | chr19:15430089-15431011 | chr19:15430777-15430796 | GGACAGCAUCCAGAAGCAGU | - |
| 2569 | 58525 | WIZ | intron_09 | chr19:15430089-15431011 | chr19:15430772-15430791 | GCAUCCAGAAGCAGUGGGUG | - |
| 2570 | 58525 | WIZ | intron_09 | chr19:15430089-15431011 | chr19:15430742-15430761 | CUGGGUCUGAGUAUGAGCUC | + |
| 2571 | 58525 | WIZ | intron_09 | chr19:15430089-15431011 | chr19:15430575-15430594 | UGAAUGGCCCUCAAGAGCAA | + |
| 2572 | 58525 | WIZ | intron_09 | chr19:15430089-15431011 | chr19:15430377-15430396 | GGGCACCCCGUAGGCCUGAA | - |
| 2573 | 58525 | WIZ | intron_09 | chr19:15430089-15431011 | chr19:15430338-15430357 | CCUUCUGUCAUCCAGCCAGU | + |
| 2574 | 58525 | WIZ | intron_09 | chr19:15430089-15431011 | chr19:15430352-15430371 | GUGAAAGGUGUCCCACUGGC | - |
| 2575 | 58525 | WIZ | intron_09 | chr19:15430089-15431011 | chr19:15430340-15430359 | CCACUGGCUGGAUGACAGAA | - |
| 2576 | 58525 | WIZ | intron_09 | chr19:15430089-15431011 | chr19:15430158-15430177 | GUGAGUGGGACUCUCAGGGG | - |
| 2577 | 58525 | WIZ | intron_09 | chr19:15430089-15431011 | chr19:15430150-15430169 | GACUCUCAGGGGAGGAGAAG | - |
| 2578 | 58525 | WIZ | intron_09 | chr19:15430089-15431011 | chr19:15430134-15430153 | GAAGCGGGAGAGCUGGGCCG | - |
| 2579 | 58525 | WIZ | intron_09 | chr19:15430089-15431011 | chr19:15430099-15430118 | AACACAGAGGCCGGGAGAGC | + |
| 2580 | 58525 | WIZ | intron_09 | chr19:15430089-15431011 | chr19:15430086-15430105 | UGGGCUGAAGGGCAACACAG | + |
| 2581 | 58525 | WIZ | exon_10_c | chr19:15429585-15430089 | chr19:15430067-15430086 | CUCGCAGGUGGUCAGGCUCU | + |
| 2582 | 58525 | WIZ | exon_10_c | chr19:15429585-15430089 | chr19:15430062-15430081 | CUGACCACCUGCGA GGUCUG | - |
| 2583 | 58525 | WIZ | exon_10_c | chr19:15429585-15430089 | chr19:15430039-15430058 | UGCCUGCUUUGAGACCCGAA | - |
| 2584 | 58525 | WIZ | exon_10_c | chr19:15429585-15430089 | chr19:15430021-15430040 | CGUGGCUGGACAGGCCCUUU | + |
| 2585 | 58525 | WIZ | exon_10_c | chr19:15429585-15430089 | chr19:15429975-15429994 | GUGGCAGAGUCGGAAAGCAG | - |
| 2586 | 58525 | WIZ | exon_10_c | chr19:15429585-15430089 | chr19:15429945-15429964 | AGCUCGUAGAGGAGGUCGAU | + |
| 2587 | 58525 | WIZ | exon_10_c | chr19:15429585-15430089 | chr19:15429944-15429963 | AAGCUCGUAGAGGAGGUCGA | + |
| 2588 | 58525 | WIZ | exon_10_c | chr19:15429585-15430089 | chr19:15429874-15429893 | GUGAGCUGGACUUCUUAGCC | + |
| 2589 | 58525 | WIZ | exon_10_c | chr19:15429585-15430089 | chr19:15429871-15429890 | UAAGAAGUCCAGCUCACUGA | - |
| 2590 | 58525 | WIZ | exon_10_c | chr19:15429585-15430089 | chr19:15429868-15429887 | GAAGUCCAGCUCACUGAAGG | - |
| 2591 | 58525 | WIZ | exon_10_c | chr19:15429585-15430089 | chr19:15429865-15429884 | GUCCAGCUCACUGAAGGAGG | - |
| 2592 | 58525 | WIZ | exon_10_c | chr19:15429585-15430089 | chr19:15429858-15429877 | UCACUGAAGGAGGUGGUCGC | - |
| 2593 | 58525 | WIZ | exon_10_c | chr19:15429585-15430089 | chr19:15429857-15429876 | CACUGAAGGAGGUGGUCGCC | - |
| 2594 | 58525 | WIZ | exon_10_c | chr19:15429585-15430089 | chr19:15429830-15429849 | GCUGAGCAAGCCGGGCCGGG | + |
| 2595 | 58525 | WIZ | exon_10_c | chr19:15429585-15430089 | chr19:15429829-15429848 | GGCUGAGCAAGCCGGGCCGG | + |
| 2596 | 58525 | WIZ | exon_10_c | chr19:15429585-15430089 | chr19:15429828-15429847 | AGGCUGAGCAAGCCGGGCCG | + |
| 2597 | 58525 | WIZ | exon_10_c | chr19:15429585-15430089 | chr19:15429827-15429846 | CAGGCUGAGCAAGCCGGGCC | + |
| 2598 | 58525 | WIZ | exon_10_c | chr19:15429585-15430089 | chr19:15429808-15429827 | GGGCAUCCAAGGGCUUGGCC | + |
| 2599 | 58525 | WIZ | exon_10_c | chr19:15429585-15430089 | chr19:15429817-15429836 | GCUCAGCCUGGCCAAGCCCU | - |
| 2600 | 58525 | WIZ | exon_10_c | chr19:15429585-15430089 | chr19:15429798-15429817 | UUGACAGCAGGGGCAUCCAA | + |
| 2601 | 58525 | WIZ | exon_10_c | chr19:15429585-15430089 | chr19:15429770-15429789 | GAAGCCGGGAGGCGACUUGA | + |
| 2602 | 58525 | WIZ | exon_10_c | chr19:15429585-15430089 | chr19:15429777-15429796 | AAAGCCAUCAAGUCGCCUCC | - |
| 2603 | 58525 | WIZ | exon_10_c | chr19:15429585-15430089 | chr19:15429759-15429778 | CCCUUGGCCGAGAAGCCGGG | + |
| 2604 | 58525 | WIZ | exon_10_c | chr19:15429585-15430089 | chr19:15429755-15429774 | CAGGCCCUUGGCCGAGAAGC | + |
| 2605 | 58525 | WIZ | exon_10_c | chr19:15429585-15430089 | chr19:15429762-15429781 | CCUCCCGGCUUCUC GGCCAA | - |
| 2606 | 58525 | WIZ | exon_10_c | chr19:15429585-15430089 | chr19:15429730-15429749 | GGAGUGGAGAGCUGGGCGGG | + |
| 2607 | 58525 | WIZ | exon_10_c | chr19:15429585-15430089 | chr19:15429723-15429742 | UUUUUGAGGAGUGGAGAGCU | + |
| 2608 | 58525 | WIZ | exon_10_c | chr19:15429585-15430089 | chr19:15429722-15429741 | CUUUUUGAGGAGUGGAGAGC | + |
| 2609 | 58525 | WIZ | exon_10_c | chr19:15429585-15430089 | chr19:15429689-15429708 | AGGGGUAGGGGAGCCCGCCA | + |
| 2610 | 58525 | WIZ | exon_10_c | chr19:15429585-15430089 | chr19:15429688-15429707 | UAGGGGUAGGGGAGCCCGCC | + |
| 2611 | 58525 | WIZ | exon_10_c | chr19:15429585-15430089 | chr19:15429628-15429647 | CCUUUGGGGAGGCCGGCCGG | + |
| 2612 | 58525 | WIZ | exon_10_c | chr19:15429585-15430089 | chr19:15429631-15429650 | CCCCCGGCCGGCCU CCCCAA | - |
| 2613 | 58525 | WIZ | exon_10_c | chr19:15429585-15430089 | chr19:15429610-15429629 | GGCACAGUGGCCUCAGUCUG | - |
| 2614 | 58525 | WIZ | exon_10_c | chr19:15429585-15430089 | chr19:15429575-15429594 | CCCACACUCACUGA GGUUCA | + |
| 2615 | 58525 | WIZ | intron_10 | chr19:15428508-15429585 | chr19:15429579-15429598 | CCCUUGAACCUCAGUGAGUG | - |
| 2616 | 58525 | WIZ | intron_10 | chr19:15428508-15429585 | chr19:15429578-15429597 | CCUUGAACCUCAGUGAGUGU | - |
| 2617 | 58525 | WIZ | intron_10 | chr19:15428508-15429585 | chr19:15429562-15429581 | GUGUGGGUCCCAAGAGCCGA | - |
| 2618 | 58525 | WIZ | intron_10 | chr19:15428508-15429585 | chr19:15429542-15429561 | GGGAGGUUCUGGCGCUGGGA | - |
| 2619 | 58525 | WIZ | intron_10 | chr19:15428508-15429585 | chr19:15429525-15429544 | GGAGGGUCGGGACCUCAGGU | - |
| 2620 | 58525 | WIZ | intron_10 | chr19:15428508-15429585 | chr19:15429511-15429530 | UCAGGUUGGGCUGUAGCCCA | - |
| 2621 | 58525 | WIZ | intron_10 | chr19:15428508-15429585 | chr19:15429506-15429525 | UUGGGCUGUAGCCCAGGGAC | - |
| 2622 | 58525 | WIZ | intron_10 | chr19:15428508-15429585 | chr19:15429412-15429431 | AAGCCUCUGCAUCUCCUUUU | - |
| 2623 | 58525 | WIZ | intron_10 | chr19:15428508-15429585 | chr19:15429361-15429380 | GGAAGAUCAGCAAAGUAAAG | + |
| 2624 | 58525 | WIZ | intron_10 | chr19:15428508-15429585 | chr19:15429338-15429357 | UCAGCCGCAGUGAGGCUUUC | + |
| 2625 | 58525 | WIZ | intron_10 | chr19:15428508-15429585 | chr19:15429328-15429347 | CUGCGGCUGAUGAGCCUGCC | - |
| 2626 | 58525 | WIZ | intron_10 | chr19:15428508-15429585 | chr19:15429311-15429330 | GUGGCGAGCAUGACCCUGGC | + |
| 2627 | 58525 | WIZ | intron_10 | chr19:15428508-15429585 | chr19:15429309-15429328 | CAGGGUCAUGCUCGCCACUG | - |
| 2628 | 58525 | WIZ | intron_10 | chr19:15428508-15429585 | chr19:15429308-15429327 | AGGGUCAUGCUCGCCACUGA | - |
| 2629 | 58525 | WIZ | intron_10 | chr19:15428508-15429585 | chr19:15429307-15429326 | GGGUCAUGCUCGCCACUGAG | - |
| 2630 | 58525 | WIZ | intron_10 | chr19:15428508-15429585 | chr19:15429292-15429311 | AGCCAAGAGCUGCCCCUCAG | + |
| 2631 | 58525 | WIZ | intron_10 | chr19:15428508-15429585 | chr19:15429274-15429293 | CUUUCUCUGGGCCUGUGGGU | - |
| 2632 | 58525 | WIZ | intron_10 | chr19:15428508-15429585 | chr19:15429273-15429292 | UUUCUCUGGGCCUGUGGGUA | - |
| 2633 | 58525 | WIZ | intron_10 | chr19:15428508-15429585 | chr19:15429272-15429291 | UUCUCUGGGCCUGUGGGUAG | - |
| 2634 | 58525 | WIZ | intron_10 | chr19:15428508-15429585 | chr19:15429210-15429229 | AGUGGUAGUUGGAAGCAUCU | - |
| 2635 | 58525 | WIZ | intron_10 | chr19:15428508-15429585 | chr19:15429200-15429219 | GGAAGCAUCUUGGAUAGACA | - |
| 2636 | 58525 | WIZ | intron_10 | chr19:15428508-15429585 | chr19:15429187-15429206 | AUAGACAGGGGAUCACCUGA | - |
| 2637 | 58525 | WIZ | intron_10 | chr19:15428508-15429585 | chr19:15429127-15429146 | CCUCUGCGUGGUGGACAGCC | + |
| 2638 | 58525 | WIZ | intron_10 | chr19:15428508-15429585 | chr19:15429130-15429149 | CCUGGCUGUCCACCACGCAG | - |
| 2639 | 58525 | WIZ | intron_10 | chr19:15428508-15429585 | chr19:15429092-15429111 | GGAGGUGGGGCUUCACCGGC | + |
| 2640 | 58525 | WIZ | intron_10 | chr19:15428508-15429585 | chr19:15429091-15429110 | CCGGUGAAGCCCCA CCUCCU | - |
| 2641 | 58525 | WIZ | intron_10 | chr19:15428508-15429585 | chr19:15429066-15429085 | GCCUGUGGGCACGGCAGGCA | - |
| 2642 | 58525 | WIZ | intron_10 | chr19:15428508-15429585 | chr19:15429045-15429064 | GGUUUGGGAAGAAACCCUCC | - |
| 2643 | 58525 | WIZ | intron_10 | chr19:15428508-15429585 | chr19:15429032-15429051 | ACCCUCCAGGUGCA GUGAGC | - |
| 2644 | 58525 | WIZ | intron_10 | chr19:15428508-15429585 | chr19:15428983-15429002 | CAGGCUUUCCCAUAUCUUUG | - |
| 2645 | 58525 | WIZ | intron_10 | chr19:15428508-15429585 | chr19:15428967-15428986 | UUUGUGGACAUUAGAGUCUG | - |
| 2646 | 58525 | WIZ | intron_10 | chr19:15428508-15429585 | chr19:15428956-15428975 | UAGAGUCUGGGGGUGACCCC | - |
| 2647 | 58525 | WIZ | intron_10 | chr19:15428508-15429585 | chr19:15428935-15428954 | UUGGGCAGGGGGUGAGACCC | + |
| 2648 | 58525 | WIZ | intron_10 | chr19:15428508-15429585 | chr19:15428924-15428943 | GGGGGGCUCCAUUGGGCAGG | + |
| 2649 | 58525 | WIZ | intron_10 | chr19:15428508-15429585 | chr19:15428922-15428941 | AUGGGGGGCUCCAUUGGGCA | + |
| 2650 | 58525 | WIZ | intron_10 | chr19:15428508-15429585 | chr19:15428907-15428926 | AACAUAAGGUGCCAAAUGGG | + |
| 2651 | 58525 | WIZ | intron_10 | chr19:15428508-15429585 | chr19:15428903-15428922 | AGGGAACAUAAGGUGCCAAA | + |
| 2652 | 58525 | WIZ | intron_10 | chr19:15428508-15429585 | chr19:15428884-15428903 | CUCAGUGGAAGCAACUUCAA | + |
| 2653 | 58525 | WIZ | intron_10 | chr19:15428508-15429585 | chr19:15428869-15428888 | CUGAGUCUGCCGUGCUUCCA | - |
| 2654 | 58525 | WIZ | intron_10 | chr19:15428508-15429585 | chr19:15428868-15428887 | UGAGUCUGCCGUGCUUCCAG | - |
| 2655 | 58525 | WIZ | intron_10 | chr19:15428508-15429585 | chr19:15428837-15428856 | GCCAAGGGCACACC UGCUCA | + |
| 2656 | 58525 | WIZ | intron_10 | chr19:15428508-15429585 | chr19:15428821-15428840 | CUGCUGGGCUCACGCAGCCA | + |
| 2657 | 58525 | WIZ | intron_10 | chr19:15428508-15429585 | chr19:15428789-15428808 | CUGCUAUGGGAGCUAUUUGG | + |
| 2658 | 58525 | WIZ | intron_10 | chr19:15428508-15429585 | chr19:15428787-15428806 | CCCUGCUAUGGGAGCUAUUU | + |
| 2659 | 58525 | WIZ | intron_10 | chr19:15428508-15429585 | chr19:15428780-15428799 | UCCCAUAGCAGGGAUCCUAG | - |
| 2660 | 58525 | WIZ | intron_10 | chr19:15428508-15429585 | chr19:15428775-15428794 | UAGCAGGGAUCCUAGGGGAG | - |
| 2661 | 58525 | WIZ | intron_10 | chr19:15428508-15429585 | chr19:15428768-15428787 | GAUCCUAGGGGAGAGGGUCU | - |
| 2662 | 58525 | WIZ | intron_10 | chr19:15428508-15429585 | chr19:15428608-15428627 | AGUUGGGGGGUCCAAGACUC | + |
| 2663 | 58525 | WIZ | intron_10 | chr19:15428508-15429585 | chr19:15428595-15428614 | UGGCUGCUCAGGCAGUUGGG | + |
| 2664 | 58525 | WIZ | intron_10 | chr19:15428508-15429585 | chr19:15428575-15428594 | GGAGGGUCUGGUGUGAUUUU | + |
| 2665 | 58525 | WIZ | intron_10 | chr19:15428508-15429585 | chr19:15428547-15428566 | GCCCCCAAGGCCGG CCAAGG | - |
| 2666 | 58525 | WIZ | intron_10 | chr19:15428508-15429585 | chr19:15428544-15428563 | CCCAAGGCCGGCCA AGGUGG | - |
| 2667 | 58525 | WIZ | intron_10 | chr19:15428508-15429585 | chr19:15428518-15428537 | CAAAACACAGGGGGGGUUCA | + |
| 2668 | 58525 | WIZ | intron_10 | chr19:15428508-15429585 | chr19:15428511-15428530 | GCGGAGACAAAACACAGGGG | + |
| 2669 | 58525 | WIZ | intron_10 | chr19:15428508-15429585 | chr19:15428506-15428525 | AAGCUGCGGAGACAAAACAC | + |
| 2670 | 58525 | WIZ | exon_11_c | chr19:15428109-15428508 | chr19:15428482-15428501 | UAGUGACGGGGGCAGAGAGC | - |
| 2671 | 58525 | WIZ | exon_11_c | chr19:15428109-15428508 | chr19:15428466-15428485 | GAGCUGGACUGCCAGCUGUG | - |
| 2672 | 58525 | WIZ | exon_11_c | chr19:15428109-15428508 | chr19:15428459-15428478 | ACUGCCAGCUGUGCGGUGCC | - |
| 2673 | 58525 | WIZ | exon_11_c | chr19:15428109-15428508 | chr19:15428438-15428457 | GCCCUUGCGGGUCUCAAACC | + |
| 2674 | 58525 | WIZ | exon_11_c | chr19:15428109-15428508 | chr19:15428442-15428461 | GCCUGGUUUGAGACCCGCAA | - |
| 2675 | 58525 | WIZ | exon_11_c | chr19:15428109-15428508 | chr19:15428426-15428445 | GUGGCUAGACAGGCCCUUGC | + |
| 2676 | 58525 | WIZ | exon_11_c | chr19:15428109-15428508 | chr19:15428404-15428423 | CCGUGCCCACCUGC GCCACC | - |
| 2677 | 58525 | WIZ | exon_11_c | chr19:15428109-15428508 | chr19:15428389-15428408 | CCACCUGGGCGUCAGCGAUC | - |
| 2678 | 58525 | WIZ | exon_11_c | chr19:15428109-15428508 | chr19:15428335-15428354 | CGUCCCUCCUGAUGAGCCCG | + |
| 2679 | 58525 | WIZ | exon_11_c | chr19:15428109-15428508 | chr19:15428292-15428311 | UGGGCCAGGGCGCCGCGCCU | + |
| 2680 | 58525 | WIZ | exon_11_c | chr19:15428109-15428508 | chr19:15428279-15428298 | CGGCCGCCCCGGGUGGGCCA | + |
| 2681 | 58525 | WIZ | exon_11_c | chr19:15428109-15428508 | chr19:15428278-15428297 | GCGGCCGCCCCGGGUGGGCC | + |
| 2682 | 58525 | WIZ | exon_11_c | chr19:15428109-15428508 | chr19:15428288-15428307 | GCGGCGCCCUGGCCCACCCG | - |
| 2683 | 58525 | WIZ | exon_11_c | chr19:15428109-15428508 | chr19:15428253-15428272 | AAGGAGAGGGCCGCGGAGGU | + |
| 2684 | 58525 | WIZ | exon_11_c | chr19:15428109-15428508 | chr19:15428249-15428268 | AAGCAAGGAGAGGGCCGCGG | + |
| 2685 | 58525 | WIZ | exon_11_c | chr19:15428109-15428508 | chr19:15428226-15428245 | UUCUUGGCCGGCGGUGGGGG | + |
| 2686 | 58525 | WIZ | exon_11_c | chr19:15428109-15428508 | chr19:15428224-15428243 | CCUUCUUGGCCGGCGGUGGG | + |
| 2687 | 58525 | WIZ | exon_11_c | chr19:15428109-15428508 | chr19:15428223-15428242 | GCCUUCUUGGCCGGCGGUGG | + |
| 2688 | 58525 | WIZ | exon_11_c | chr19:15428109-15428508 | chr19:15428222-15428241 | GGCCUUCUUGGCCGGCGGUG | + |
| 2689 | 58525 | WIZ | exon_11_c | chr19:15428109-15428508 | chr19:15428221-15428240 | UGGCCUUCUUGGCCGGCGGU | + |
| 2690 | 58525 | WIZ | exon_11_c | chr19:15428109-15428508 | chr19:15428220-15428239 | UUGGCCUUCUUGGCCGGCGG | + |
| 2691 | 58525 | WIZ | exon_11_c | chr19:15428109-15428508 | chr19:15428227-15428246 | CCCCCCACCGCCGG CCAAGA | - |
| 2692 | 58525 | WIZ | exon_11_c | chr19:15428109-15428508 | chr19:15428177-15428196 | GUCCUGCUUCCCCC AGGGGC | + |
| 2693 | 58525 | WIZ | exon_11_c | chr19:15428109-15428508 | chr19:15428190-15428209 | GCGGGUAUGGCCAGCCCCUG | - |
| 2694 | 58525 | WIZ | exon_11_c | chr19:15428109-15428508 | chr19:15428173-15428192 | AGAGGUCCUGCUUCCCCCAG | + |
| 2695 | 58525 | WIZ | exon_11_c | chr19:15428109-15428508 | chr19:15428171-15428190 | CGAGAGGUCCUGCUUCCCCC | + |
| 2696 | 58525 | WIZ | exon_11_c | chr19:15428109-15428508 | chr19:15428144-15428163 | CCAGAAAAUGCCGGCGGCUG | + |
| 2697 | 58525 | WIZ | exon_11_c | chr19:15428109-15428508 | chr19:15428138-15428157 | AGAGGCCCAGAAAAUGCCGG | + |
| 2698 | 58525 | WIZ | exon_11_c | chr19:15428109-15428508 | chr19:15428134-15428153 | CAUUUUCUGGGCCUCUGAUG | - |
| 2699 | 58525 | WIZ | exon_11_c | chr19:15428109-15428508 | chr19:15428106-15428125 | CUACAGAGGUUGAGAGGAGA | + |
| 2700 | 58525 | WIZ | intron_11 | chr19:15427533-15428109 | chr19:15428057-15428076 | GCGGGCCCUGGAGCCCCUCC | - |
| 2701 | 58525 | WIZ | intron_11 | chr19:15427533-15428109 | chr19:15428051-15428070 | CCUGGAGCCCCUCC CGGGGG | - |
| 2702 | 58525 | WIZ | intron_11 | chr19:15427533-15428109 | chr19:15428049-15428068 | UGGAGCCCCUCCCGGGGGGG | - |
| 2703 | 58525 | WIZ | intron_11 | chr19:15427533-15428109 | chr19:15428010-15428029 | UGUCUACUCCCUGCCCCAGC | + |
| 2704 | 58525 | WIZ | intron_11 | chr19:15427533-15428109 | chr19:15428002-15428021 | AGGGAGUAGACAGGGGCCCU | - |
| 2705 | 58525 | WIZ | intron_11 | chr19:15427533-15428109 | chr19:15427982-15428001 | GCAGAACCGGCCCA CUGCCA | + |
| 2706 | 58525 | WIZ | intron_11 | chr19:15427533-15428109 | chr19:15427996-15428015 | UAGACAGGGGCCCUUGGCAG | - |
| 2707 | 58525 | WIZ | intron_11 | chr19:15427533-15428109 | chr19:15427963-15427982 | CCCAGAGAUCUUGUUGGCAG | - |
| 2708 | 58525 | WIZ | intron_11 | chr19:15427533-15428109 | chr19:15427941-15427960 | GGCUGCUAGGCCCUCUCUCU | - |
| 2709 | 58525 | WIZ | intron_11 | chr19:15427533-15428109 | chr19:15427899-15427918 | UUGGCCUUCAUUCUCAGGAA | + |
| 2710 | 58525 | WIZ | intron_11 | chr19:15427533-15428109 | chr19:15427906-15427925 | AUGACCCUUCCUGAGAAUGA | - |
| 2711 | 58525 | WIZ | intron_11 | chr19:15427533-15428109 | chr19:15427900-15427919 | CUUCCUGAGAAUGAAGGCCA | - |
| 2712 | 58525 | WIZ | intron_11 | chr19:15427533-15428109 | chr19:15427897-15427916 | CCUGAGAAUGAAGGCCAAGG | - |
| 2713 | 58525 | WIZ | intron_11 | chr19:15427533-15428109 | chr19:15427865-15427884 | UGCUCUGCACACUAAAAGGC | + |
| 2714 | 58525 | WIZ | intron_11 | chr19:15427533-15428109 | chr19:15427841-15427860 | CAUCCAGACAGGGGCAGAUG | + |
| 2715 | 58525 | WIZ | intron_11 | chr19:15427533-15428109 | chr19:15427843-15427862 | CACAUCUGCCCCUG UCUGGA | - |
| 2716 | 58525 | WIZ | intron_11 | chr19:15427533-15428109 | chr19:15427786-15427805 | UGUGGGUCCCAACAAGGACA | + |
| 2717 | 58525 | WIZ | intron_11 | chr19:15427533-15428109 | chr19:15427772-15427791 | CCCACAGAGCAAUG GAAUCU | - |
| 2718 | 58525 | WIZ | intron_11 | chr19:15427533-15428109 | chr19:15427718-15427737 | GGAGGCUCCAGAGAGCACAU | + |
| 2719 | 58525 | WIZ | intron_11 | chr19:15427533-15428109 | chr19:15427698-15427717 | CCUCACUCCUGCCG GGUAUC | - |
| 2720 | 58525 | WIZ | intron_11 | chr19:15427533-15428109 | chr19:15427634-15427653 | CCCACAGGUUAGGGUGGUGA | + |
| 2721 | 58525 | WIZ | intron_11 | chr19:15427533-15428109 | chr19:15427633-15427652 | GCCCACAGGUUAGGGUGGUG | + |
| 2722 | 58525 | WIZ | intron_11 | chr19:15427533-15428109 | chr19:15427625-15427644 | AGCAGCACGCCCAC AGGUUA | + |
| 2723 | 58525 | WIZ | intron_11 | chr19:15427533-15428109 | chr19:15427624-15427643 | CAGCAGCACGCCCA CAGGUU | + |
| 2724 | 58525 | WIZ | intron_11 | chr19:15427533-15428109 | chr19:15427619-15427638 | GGCGGCAGCAGCACGCCCAC | + |
| 2725 | 58525 | WIZ | intron_11 | chr19:15427533-15428109 | chr19:15427601-15427620 | CCUGGUCGGCUGGGCGUGGG | + |
| 2726 | 58525 | WIZ | intron_11 | chr19:15427533-15428109 | chr19:15427604-15427623 | CCGCCCACGCCCAG CCGACC | - |
| 2727 | 58525 | WIZ | intron_11 | chr19:15427533-15428109 | chr19:15427587-15427606 | ACCUGCAGGAGUGUCCUGGU | + |
| 2728 | 58525 | WIZ | intron_11 | chr19:15427533-15428109 | chr19:15427583-15427602 | GGUCACCUGCAGGAGUGUCC | + |
| 2729 | 58525 | WIZ | intron_11 | chr19:15427533-15428109 | chr19:15427591-15427610 | GCCGACCAGGACAC UCCUGC | - |
| 2730 | 58525 | WIZ | intron_11 | chr19:15427533-15428109 | chr19:15427579-15427598 | ACUCCUGCAGGUGACCAUGC | - |
| 2731 | 58525 | WIZ | intron_11 | chr19:15427533-15428109 | chr19:15427562-15427581 | GCAUCGUGGAACUGCCAGCA | + |
| 2732 | 58525 | WIZ | exon_12_c | chr19:15426981-15427533 | chr19:15427511-15427530 | UCGUGCUGGCUCUGGGCCUG | + |
| 2733 | 58525 | WIZ | exon_12_c | chr19:15426981-15427533 | chr19:15427504-15427523 | GGAUGUCUCGUGCUGGCUCU | + |
| 2734 | 58525 | WIZ | exon_12_c | chr19:15426981-15427533 | chr19:15427415-15427434 | GGCAAAUGGGCGUGACCGAG | - |
| 2735 | 58525 | WIZ | exon_12_c | chr19:15426981-15427533 | chr19:15427374-15427393 | AUCUCCCGCAGCGUGUCGAU | + |
| 2736 | 58525 | WIZ | exon_12_c | chr19:15426981-15427533 | chr19:15427373-15427392 | GAUCUCCCGCAGCGUGUCGA | + |
| 2737 | 58525 | WIZ | exon_12_c | chr19:15426981-15427533 | chr19:15427382-15427401 | GCUCGCCCAUCGAC ACGCUG | - |
| 2738 | 58525 | WIZ | exon_12_c | chr19:15426981-15427533 | chr19:15427336-15427355 | GAGGUCCACCAGGCCGAGAC | + |
| 2739 | 58525 | WIZ | exon_12_c | chr19:15426981-15427533 | chr19:15427326-15427345 | GGUGGGUUGGGAGGUCCACC | + |
| 2740 | 58525 | WIZ | exon_12_c | chr19:15426981-15427533 | chr19:15427325-15427344 | GUGGACCUCCCAAC CCACCA | - |
| 2741 | 58525 | WIZ | exon_12_c | chr19:15426981-15427533 | chr19:15427309-15427328 | CUUUUGGGCUUGGCCCUGGU | + |
| 2742 | 58525 | WIZ | exon_12_c | chr19:15426981-15427533 | chr19:15427294-15427313 | UCAUCUUGGCCAGGGCUUUU | + |
| 2743 | 58525 | WIZ | exon_12_c | chr19:15426981-15427533 | chr19:15427285-15427304 | CGCCGCCCAUCAUC UUGGCC | + |
| 2744 | 58525 | WIZ | exon_12_c | chr19:15426981-15427533 | chr19:15427293-15427312 | AAAGCCCUGGCCAA GAUGAU | - |
| 2745 | 58525 | WIZ | exon_12_c | chr19:15426981-15427533 | chr19:15427278-15427297 | AUGAUGGGCGGCGCAGGUCC | - |
| 2746 | 58525 | WIZ | exon_12_c | chr19:15426981-15427533 | chr19:15427204-15427223 | CAAGAAGUUGCCACCACCAC | - |
| 2747 | 58525 | WIZ | exon_12_c | chr19:15426981-15427533 | chr19:15427203-15427222 | AAGAAGUUGCCACCACCACC | - |
| 2748 | 58525 | WIZ | exon_12_c | chr19:15426981-15427533 | chr19:15427174-15427193 | CAGUUGGUGAGUGGCCCAGG | + |
| 2749 | 58525 | WIZ | exon_12_c | chr19:15426981-15427533 | chr19:15427135-15427154 | CCGAAAGAUGUUCCCAGGCC | - |
| 2750 | 58525 | WIZ | exon_12_c | chr19:15426981-15427533 | chr19:15427104-15427123 | UUCAGCUUCUUGGGCAAGGA | + |
| 2751 | 58525 | WIZ | exon_12_c | chr19:15426981-15427533 | chr19:15427103-15427122 | CUUCAGCUUCUUGGGCAAGG | + |
| 2752 | 58525 | WIZ | exon_12_c | chr19:15426981-15427533 | chr19:15427041-15427060 | AGUUCCCCAUGAAGGGCCCC | + |
| 2753 | 58525 | WIZ | exon_12_c | chr19:15426981-15427533 | chr19:15427033-15427052 | AUGGGUGCAGUUCCCCAUGA | + |
| 2754 | 58525 | WIZ | exon_12_c | chr19:15426981-15427533 | chr19:15427030-15427049 | UGGGGAACUGCACCCAUCUG | - |
| 2755 | 58525 | WIZ | exon_12_c | chr19:15426981-15427533 | chr19:15427015-15427034 | CCCCCCAGGGACCC UCAGAU | + |
| 2756 | 58525 | WIZ | exon_12_c | chr19:15426981-15427533 | chr19:15427020-15427039 | CACCCAUCUGAGGGUCCCUG | - |
| 2757 | 58525 | WIZ | exon_12_c | chr19:15426981-15427533 | chr19:15427010-15427029 | AGGGUCCCUGGGGGGCACCA | - |
| 2758 | 58525 | WIZ | exon_12_c | chr19:15426981-15427533 | chr19:15426972-15426991 | UCACACUUACACAG GUUCAG | + |
| 2759 | 58525 | WIZ | exon_12_c | chr19:15426981-15427533 | chr19:15426971-15426990 | GUCACACUUACACA GGUUCA | + |
| 2760 | 58525 | WIZ | exon_12_c | chr19:15426981-15427533 | chr19:15426970-15426989 | GGUCACACUUACACAGGUUC | + |
| 2761 | 58525 | WIZ | intron_12 | chr19:15425768-15426981 | chr19:15426964-15426983 | CUGCAGGGUCACACUUACAC | + |
| 2762 | 58525 | WIZ | intron_12 | chr19:15425768-15426981 | chr19:15426948-15426967 | UGUUCUCCCUGCCCUACUGC | + |
| 2763 | 58525 | WIZ | intron_12 | chr19:15425768-15426981 | chr19:15426941-15426960 | GGCAGGGAGAACAGUUGGAG | - |
| 2764 | 58525 | WIZ | intron_12 | chr19:15425768-15426981 | chr19:15426909-15426928 | GAUACCCCCAAGGGGAGGCA | + |
| 2765 | 58525 | WIZ | intron_12 | chr19:15425768-15426981 | chr19:15426901-15426920 | GCACUCUGGAUACCCCCAAG | + |
| 2766 | 58525 | WIZ | intron_12 | chr19:15425768-15426981 | chr19:15426898-15426917 | GGGGGUAUCCAGAGUGCCUA | - |
| 2767 | 58525 | WIZ | intron_12 | chr19:15425768-15426981 | chr19:15426879-15426898 | CUCCCUUCCAAUUC AACCCU | + |
| 2768 | 58525 | WIZ | intron_12 | chr19:15425768-15426981 | chr19:15426889-15426908 | CAGAGUGCCUAGGGUUGAAU | - |
| 2769 | 58525 | WIZ | intron_12 | chr19:15425768-15426981 | chr19:15426885-15426904 | GUGCCUAGGGUUGAAUUGGA | - |
| 2770 | 58525 | WIZ | intron_12 | chr19:15425768-15426981 | chr19:15426884-15426903 | UGCCUAGGGUUGAAUUGGAA | - |
| 2771 | 58525 | WIZ | intron_12 | chr19:15425768-15426981 | chr19:15426872-15426891 | AAUUGGAAGGGAGGACACGC | - |
| 2772 | 58525 | WIZ | intron_12 | chr19:15425768-15426981 | chr19:15426804-15426823 | GAGCAGCAGCUCAGUUGCAG | + |
| 2773 | 58525 | WIZ | intron_12 | chr19:15425768-15426981 | chr19:15426802-15426821 | UUGAGCAGCAGCUCAGUUGC | + |
| 2774 | 58525 | WIZ | intron_12 | chr19:15425768-15426981 | chr19:15426722-15426741 | GAUUGAAAUGGCACAAGAGA | + |
| 2775 | 58525 | WIZ | intron_12 | chr19:15425768-15426981 | chr19:15426684-15426703 | UUUCUCCCUAGGAGUCUGGC | + |
| 2776 | 58525 | WIZ | intron_12 | chr19:15425768-15426981 | chr19:15426673-15426692 | UCCCCGCAGUCUUUCUCCCU | + |
| 2777 | 58525 | WIZ | intron_12 | chr19:15425768-15426981 | chr19:15426679-15426698 | ACUCCUAGGGAGAAAGACUG | - |
| 2778 | 58525 | WIZ | intron_12 | chr19:15425768-15426981 | chr19:15426678-15426697 | CUCCUAGGGAGAAAGACUGC | - |
| 2779 | 58525 | WIZ | intron_12 | chr19:15425768-15426981 | chr19:15426641-15426660 | GUCUGCUACAGCAGGAGCGU | - |
| 2780 | 58525 | WIZ | intron_12 | chr19:15425768-15426981 | chr19:15426597-15426616 | CUGUGUCUUUCUGACAUUUU | - |
| 2781 | 58525 | WIZ | intron_12 | chr19:15425768-15426981 | chr19:15426522-15426541 | CACAUAAAGCUAGACUGUGG | + |
| 2782 | 58525 | WIZ | intron_12 | chr19:15425768-15426981 | chr19:15426454-15426473 | CAAGAAAACCAGAC AGAGUU | + |
| 2783 | 58525 | WIZ | intron_12 | chr19:15425768-15426981 | chr19:15426374-15426393 | AGCAAGUGACAUUACAAUGA | + |
| 2784 | 58525 | WIZ | intron_12 | chr19:15425768-15426981 | chr19:15426336-15426355 | GCACUGUGUUCAUUCUGCUC | - |
| 2785 | 58525 | WIZ | intron_12 | chr19:15425768-15426981 | chr19:15426328-15426347 | UUCAUUCUGCUCAGGUUGAU | - |
| 2786 | 58525 | WIZ | intron_12 | chr19:15425768-15426981 | chr19:15426203-15426222 | ACUUUGGGACGGUCUAAAAU | + |
| 2787 | 58525 | WIZ | intron_12 | chr19:15425768-15426981 | chr19:15426107-15426126 | AUACCUCCCUGUAUGAUCCU | + |
| 2788 | 58525 | WIZ | intron_12 | chr19:15425768-15426981 | chr19:15426051-15426070 | CAGAAGAGCCAGAUGUUAAA | - |
| 2789 | 58525 | WIZ | intron_12 | chr19:15425768-15426981 | chr19:15426043-15426062 | CCAGAUGUUAAAAGGGCCUC | - |
| 2790 | 58525 | WIZ | intron_12 | chr19:15425768-15426981 | chr19:15426013-15426032 | CAACAACCUGCUCC CUCAUC | + |
| 2791 | 58525 | WIZ | intron_12 | chr19:15425768-15426981 | chr19:15426001-15426020 | GGUUGUUGCGGUCUGGUGGG | - |
| 2792 | 58525 | WIZ | intron_12 | chr19:15425768-15426981 | chr19:15425991-15426010 | GUCUGGUGGGUGGUGUGGAC | - |
| 2793 | 58525 | WIZ | intron_12 | chr19:15425768-15426981 | chr19:15425981-15426000 | UGGUGUGGACAGGGGUAGCU | - |
| 2794 | 58525 | WIZ | intron_12 | chr19:15425768-15426981 | chr19:15425962-15425981 | UAGGCAGCUGGCACUGAUAC | - |
| 2795 | 58525 | WIZ | intron_12 | chr19:15425768-15426981 | chr19:15425763-15425782 | GGGACGCUGCAGGGGAUCCA | + |
| 2796 | 58525 | WIZ | intron_12 | chr19:15425768-15426981 | chr19:15425755-15425774 | CUCUGCCCGGGACGCUGCAG | + |
| 2797 | 58525 | WIZ | exon_13_c | chr19:15425240-15425768 | chr19:15425764-15425783 | CUGGAUCCCCUGCAGCGUCC | - |
| 2798 | 58525 | WIZ | exon_13_c | chr19:15425240-15425768 | chr19:15425763-15425782 | UGGAUCCCCUGCAGCGUCCC | - |
| 2799 | 58525 | WIZ | exon_13_c | chr19:15425240-15425768 | chr19:15425743-15425762 | GUCGCGCACCGGCUCUGCCC | + |
| 2800 | 58525 | WIZ | exon_13_c | chr19:15425240-15425768 | chr19:15425742-15425761 | UGUCGCGCACCGGCUCUGCC | + |
| 2801 | 58525 | WIZ | exon_13_c | chr19:15425240-15425768 | chr19:15425754-15425773 | UGCAGCGUCCCGGGCAGAGC | - |
| 2802 | 58525 | WIZ | exon_13_c | chr19:15425240-15425768 | chr19:15425718-15425737 | ACUCGCCGCAGAAC UCACAG | + |
| 2803 | 58525 | WIZ | exon_13_c | chr19:15425240-15425768 | chr19:15425671-15425690 | GUCACGCGCGCUCACACCUG | - |
| 2804 | 58525 | WIZ | exon_13_c | chr19:15425240-15425768 | chr19:15425664-15425683 | GCGCUCACACCUGC GGCAGA | - |
| 2805 | 58525 | WIZ | exon_13_c | chr19:15425240-15425768 | chr19:15425623-15425642 | GUCGAUGGGCGAACCAUUGA | + |
| 2806 | 58525 | WIZ | exon_13_c | chr19:15425240-15425768 | chr19:15425609-15425628 | AUCUCUCGCAGUGUGUCGAU | + |
| 2807 | 58525 | WIZ | exon_13_c | chr19:15425240-15425768 | chr19:15425608-15425627 | GAUCUCUCGCAGUGUGUCGA | + |
| 2808 | 58525 | WIZ | exon_13_c | chr19:15425240-15425768 | chr19:15425572-15425591 | CUUCUUGAUGAGGCACGGCU | + |
| 2809 | 58525 | WIZ | exon_13_c | chr19:15425240-15425768 | chr19:15425574-15425593 | CAAGCCGUGCCUCA UCAAGA | - |
| 2810 | 58525 | WIZ | exon_13_c | chr19:15425240-15425768 | chr19:15425527-15425546 | CCCGUCCUCAGCCA GGGCAG | + |
| 2811 | 58525 | WIZ | exon_13_c | chr19:15425240-15425768 | chr19:15425525-15425544 | GGCCCGUCCUCAGCCAGGGC | + |
| 2812 | 58525 | WIZ | exon_13_c | chr19:15425240-15425768 | chr19:15425520-15425539 | UGGGAGGCCCGUCCUCAGCC | + |
| 2813 | 58525 | WIZ | exon_13_c | chr19:15425240-15425768 | chr19:15425501-15425520 | ACGGGCCCAGGGGCCACGGU | + |
| 2814 | 58525 | WIZ | exon_13_c | chr19:15425240-15425768 | chr19:15425500-15425519 | CACGGGCCCAGGGGCCACGG | + |
| 2815 | 58525 | WIZ | exon_13_c | chr19:15425240-15425768 | chr19:15425482-15425501 | CAGCGGCAGUGGGGACUGCA | + |
| 2816 | 58525 | WIZ | exon_13_c | chr19:15425240-15425768 | chr19:15425473-15425492 | CAGGGGCGACAGCGGCAGUG | + |
| 2817 | 58525 | WIZ | exon_13_c | chr19:15425240-15425768 | chr19:15425472-15425491 | CCAGGGGCGACAGCGGCAGU | + |
| 2818 | 58525 | WIZ | exon_13_c | chr19:15425240-15425768 | chr19:15425475-15425494 | CCCACUGCCGCUGUCGCCCC | - |
| 2819 | 58525 | WIZ | exon_13_c | chr19:15425240-15425768 | chr19:15425456-15425475 | UUGCCUGGCCGGCCAGCCAG | + |
| 2820 | 58525 | WIZ | exon_13_c | chr19:15425240-15425768 | chr19:15425445-15425464 | CUGCACCUGGUUUGCCUGGC | + |
| 2821 | 58525 | WIZ | exon_13_c | chr19:15425240-15425768 | chr19:15425446-15425465 | GGCCAGGCAAACCA GGUGCA | - |
| 2822 | 58525 | WIZ | exon_13_c | chr19:15425240-15425768 | chr19:15425408-15425427 | GGCGUCAGGCUGAGCUCACG | + |
| 2823 | 58525 | WIZ | exon_13_c | chr19:15425240-15425768 | chr19:15425343-15425362 | GGCAGCCAAGCGGCCCCUGC | - |
| 2824 | 58525 | WIZ | exon_13_c | chr19:15425240-15425768 | chr19:15425326-15425345 | GAGGAGGCGGUCCUCCUGCA | + |
| 2825 | 58525 | WIZ | exon_13_c | chr19:15425240-15425768 | chr19:15425230-15425249 | CCGCUGCUUACAGGAGUGGG | + |
| 2826 | 58525 | WIZ | exon_13_c | chr19:15425240-15425768 | chr19:15425226-15425245 | CCGCCCGCUGCUUACAGGAG | + |
| 2827 | 58525 | WIZ | intron_13 | chr19:15425032-15425240 | chr19:15425221-15425240 | CCCUGCCGCCCGCU GCUUAC | + |
| 2828 | 58525 | WIZ | intron_13 | chr19:15425032-15425240 | chr19:15425175-15425194 | GUGGCAUUGCCUGGCCUGGC | + |
| 2829 | 58525 | WIZ | intron_13 | chr19:15425032-15425240 | chr19:15425138-15425157 | CCAAGUGGGGCCCCCAUGGC | - |
| 2830 | 58525 | WIZ | intron_13 | chr19:15425032-15425240 | chr19:15425123-15425142 | UCCCACACAGACCC AGCCAU | + |
| 2831 | 58525 | WIZ | intron_13 | chr19:15425032-15425240 | chr19:15425122-15425141 | CUCCCACACAGACC CAGCCA | + |
| 2832 | 58525 | WIZ | intron_13 | chr19:15425032-15425240 | chr19:15425124-15425143 | CAUGGCUGGGUCUGUGUGGG | - |
| 2833 | 58525 | WIZ | intron_13 | chr19:15425032-15425240 | chr19:15425115-15425134 | GUCUGUGUGGGAGGCGGGAU | - |
| 2834 | 58525 | WIZ | intron_13 | chr19:15425032-15425240 | chr19:15425108-15425127 | UGGGAGGCGGGAUUGGCACC | - |
| 2835 | 58525 | WIZ | intron_13 | chr19:15425032-15425240 | chr19:15425102-15425121 | GCGGGAUUGGCACCUGGCCU | - |
| 2836 | 58525 | WIZ | intron_13 | chr19:15425032-15425240 | chr19:15425070-15425089 | CUGGGUGCACCUGCCCCCUU | - |
| 2837 | 58525 | WIZ | intron_13 | chr19:15425032-15425240 | chr19:15425051-15425070 | GCUGCUGAGUCACAGCCCAA | + |
| 2838 | 58525 | WIZ | intron_13 | chr19:15425032-15425240 | chr19:15425018-15425037 | AGCAGGCCUCGGUGGCUGCG | + |
| 2839 | 58525 | WIZ | exon_14_c | chr19:15424612-15425032 | chr19:15424959-15424978 | UGCCCGUGCGUGGCUGGCCA | + |
| 2840 | 58525 | WIZ | exon_14_c | chr19:15424612-15425032 | chr19:15424949-15424968 | GCCGCAGGUGUGCCCGUGCG | + |
| 2841 | 58525 | WIZ | exon_14_c | chr19:15424612-15425032 | chr19:15424871-15424890 | GAUCAAACACCGGC CCCAGA | - |
| 2842 | 58525 | WIZ | exon_14_c | chr19:15424612-15425032 | chr19:15424855-15424874 | CGGUAGGCGCCCACCUUCUG | + |
| 2843 | 58525 | WIZ | exon_14_c | chr19:15424612-15425032 | chr19:15424854-15424873 | GCGGUAGGCGCCCACCUUCU | + |
| 2844 | 58525 | WIZ | exon_14_c | chr19:15424612-15425032 | chr19:15424867-15424886 | AAACACCGGCCCCA GAAGGU | - |
| 2845 | 58525 | WIZ | exon_14_c | chr19:15424612-15425032 | chr19:15424853-15424872 | UGCGGUAGGCGCCCACCUUC | + |
| 2846 | 58525 | WIZ | exon_14_c | chr19:15424612-15425032 | chr19:15424840-15424859 | UACCGCAGCUACAUCCAGGG | - |
| 2847 | 58525 | WIZ | exon_14_c | chr19:15424612-15425032 | chr19:15424793-15424812 | CACGGCCAUGGCCGGCACUG | + |
| 2848 | 58525 | WIZ | exon_14_c | chr19:15424612-15425032 | chr19:15424801-15424820 | AAGUUCCGCAGUGCCGGCCA | - |
| 2849 | 58525 | WIZ | exon_14_c | chr19:15424612-15425032 | chr19:15424738-15424757 | CCGACCACGGCCAG GCCCCC | + |
| 2850 | 58525 | WIZ | exon_14_c | chr19:15424612-15425032 | chr19:15424745-15424764 | GGCACCCGGGGGCCUGGCCG | - |
| 2851 | 58525 | WIZ | exon_14_c | chr19:15424612-15425032 | chr19:15424715-15424734 | CUGGCUCCCCUCCG GCACUG | + |
| 2852 | 58525 | WIZ | exon_14_c | chr19:15424612-15425032 | chr19:15424717-15424736 | CGCAGUGCCGGAGGGGAGCC | - |
| 2853 | 58525 | WIZ | exon_14_c | chr19:15424612-15425032 | chr19:15424689-15424708 | GUCGGCUGCCCGGCCAGCCU | + |
| 2854 | 58525 | WIZ | exon_14_c | chr19:15424612-15425032 | chr19:15424680-15424699 | GGGCAGCCGACGGUGGUGAG | - |
| 2855 | 58525 | WIZ | intron_14 | chr19:15424378-15424612 | chr19:15424604-15424623 | GAACAUCAACAGUGAGUGCU | - |
| 2856 | 58525 | WIZ | intron_14 | chr19:15424378-15424612 | chr19:15424527-15424546 | GGGCCACAGCAGAGCGCCUG | + |
| 2857 | 58525 | WIZ | intron_14 | chr19:15424378-15424612 | chr19:15424525-15424544 | AAGGGCCACAGCAGAGCGCC | + |
| 2858 | 58525 | WIZ | intron_14 | chr19:15424378-15424612 | chr19:15424462-15424481 | CUACCUGGAUGGGUGGGAUG | + |
| 2859 | 58525 | WIZ | intron_14 | chr19:15424378-15424612 | chr19:15424460-15424479 | UGCUACCUGGAUGGGUGGGA | + |
| 2860 | 58525 | WIZ | intron_14 | chr19:15424378-15424612 | chr19:15424456-15424475 | CUGAUGCUACCUGGAUGGGU | + |
| 2861 | 58525 | WIZ | intron_14 | chr19:15424378-15424612 | chr19:15424393-15424412 | GGGACGGGAGAUGAGUGGGA | + |
| 2862 | 58525 | WIZ | intron_14 | chr19:15424378-15424612 | chr19:15424372-15424391 | UCAAAUUCUAAGGUGGAGAG | + |
| 2863 | 58525 | WIZ | intron_14 | chr19:15424378-15424612 | chr19:15424370-15424389 | GUUCAAAUUCUAAGGUGGAG | + |
| 2864 | 58525 | WIZ | intron_14 | chr19:15424378-15424612 | chr19:15424365-15424384 | UCGGCGUUCAAAUUCUAAGG | + |
| 2865 | 58525 | WIZ | exon_15_c | chr19:15424182-15424378 | chr19:15424330-15424349 | CCCCGGGCUGCGGAGGCAUC | + |
| 2866 | 58525 | WIZ | exon_15_c | chr19:15424182-15424378 | chr19:15424320-15424339 | GUCCUCGCCUCCCC GGGCUG | + |
| 2867 | 58525 | WIZ | exon_15_c | chr19:15424182-15424378 | chr19:15424313-15424332 | CAUUGGUGUCCUCGCCUCCC | + |
| 2868 | 58525 | WIZ | exon_15_c | chr19:15424182-15424378 | chr19:15424215-15424234 | CUUGACAAGUGAUGUCUGGG | + |
| 2869 | 58525 | WIZ | exon_15_c | chr19:15424182-15424378 | chr19:15424213-15424232 | AACUUGACAAGUGAUGUCUG | + |
| 2870 | 58525 | WIZ | exon_15_c | chr19:15424182-15424378 | chr19:15424173-15424192 | GGCAGCCUACCUGCAUUUGA | + |
| 2871 | 58525 | WIZ | intron_15 | chr19:15423235-15424182 | chr19:15424170-15424189 | AAUGCAGGUAGGCUGCCCCU | - |
| 2872 | 58525 | WIZ | intron_15 | chr19:15423235-15424182 | chr19:15424168-15424187 | UGCAGGUAGGCUGCCCCUGG | - |
| 2873 | 58525 | WIZ | intron_15 | chr19:15423235-15424182 | chr19:15424165-15424184 | AGGUAGGCUGCCCCUGGGGG | - |
| 2874 | 58525 | WIZ | intron_15 | chr19:15423235-15424182 | chr19:15424122-15424141 | ACCUUGGUCACCCGGAGCCU | - |
| 2875 | 58525 | WIZ | intron_15 | chr19:15423235-15424182 | chr19:15424077-15424096 | GCUGGGAGGUGUCGCCUCAG | - |
| 2876 | 58525 | WIZ | intron_15 | chr19:15423235-15424182 | chr19:15424060-15424079 | ACACCCAAGGGCAG CCACUG | + |
| 2877 | 58525 | WIZ | intron_15 | chr19:15423235-15424182 | chr19:15424067-15424086 | GUCGCCUCAGUGGCUGCCCU | - |
| 2878 | 58525 | WIZ | intron_15 | chr19:15423235-15424182 | chr19:15424066-15424085 | UCGCCUCAGUGGCUGCCCUU | - |
| 2879 | 58525 | WIZ | intron_15 | chr19:15423235-15424182 | chr19:15424011-15424030 | CUCGCAGGCUACAAAGCUCA | + |
| 2880 | 58525 | WIZ | intron_15 | chr19:15423235-15424182 | chr19:15424010-15424029 | UCUCGCAGGCUACAAAGCUC | + |
| 2881 | 58525 | WIZ | intron_15 | chr19:15423235-15424182 | chr19:15423945-15423964 | AGCAGGUAAGUCCUUCCCUG | + |
| 2882 | 58525 | WIZ | intron_15 | chr19:15423235-15424182 | chr19:15423908-15423927 | UCAACCCGCUUUUAUGAGUG | + |
| 2883 | 58525 | WIZ | intron_15 | chr19:15423235-15424182 | chr19:15423744-15423763 | UUCAAUGUACUUGUGGACUU | + |
| 2884 | 58525 | WIZ | intron_15 | chr19:15423235-15424182 | chr19:15423643-15423662 | AAGCUCCAUGGCUCAAGACG | + |
| 2885 | 58525 | WIZ | intron_15 | chr19:15423235-15424182 | chr19:15423610-15423629 | AAAAAGGCCUCACA GCACAG | + |
| 2886 | 58525 | WIZ | intron_15 | chr19:15423235-15424182 | chr19:15423523-15423542 | AUAGAAUCUGAGACAGUAGA | + |
| 2887 | 58525 | WIZ | intron_15 | chr19:15423235-15424182 | chr19:15423511-15423530 | GAUUCUAUGUAUCUGCCAGA | - |
| 2888 | 58525 | WIZ | intron_15 | chr19:15423235-15424182 | chr19:15423498-15423517 | UGCCAGAUGGCAGGGGUACC | - |
| 2889 | 58525 | WIZ | intron_15 | chr19:15423235-15424182 | chr19:15423462-15423481 | AAGUCACUGGUGCCAGGUAA | + |
| 2890 | 58525 | WIZ | intron_15 | chr19:15423235-15424182 | chr19:15423456-15423475 | GCUCAGAAGUCACUGGUGCC | + |
| 2891 | 58525 | WIZ | intron_15 | chr19:15423235-15424182 | chr19:15423446-15423465 | ACUUCUGAGCACAGAGGCAG | - |
| 2892 | 58525 | WIZ | intron_15 | chr19:15423235-15424182 | chr19:15423408-15423427 | ACUCACCAUGGGGUCAUGGC | + |
| 2893 | 58525 | WIZ | intron_15 | chr19:15423235-15424182 | chr19:15423398-15423417 | AGCCACCUCCACUC ACCAUG | + |
| 2894 | 58525 | WIZ | intron_15 | chr19:15423235-15424182 | chr19:15423406-15423425 | CAUGACCCCAUGGUGAGUGG | - |
| 2895 | 58525 | WIZ | intron_15 | chr19:15423235-15424182 | chr19:15423403-15423422 | GACCCCAUGGUGAGUGGAGG | - |
| 2896 | 58525 | WIZ | intron_15 | chr19:15423235-15424182 | chr19:15423315-15423334 | ACACCUGCUGCUACUCAGUG | + |
| 2897 | 58525 | WIZ | intron_15 | chr19:15423235-15424182 | chr19:15423321-15423340 | UGUCCACACUGAGUAGCAGC | - |
| 2898 | 58525 | WIZ | intron_15 | chr19:15423235-15424182 | chr19:15423291-15423310 | AUAGCCUUGCCAGCAUCCCU | + |
| 2899 | 58525 | WIZ | intron_15 | chr19:15423235-15424182 | chr19:15423223-15423242 | CACCUCACAGAACC UGCAUG | + |
| 2900 | 58525 | WIZ | intron_15 | chr19:15423235-15424182 | chr19:15423221-15423240 | UCCACCUCACAGAA CCUGCA | + |
| 2901 | 58525 | WIZ | exon_16_c | chr19:15423075-15423235 | chr19:15423228-15423247 | UCCCCCAUGCAGGUUCUGUG | - |
| 2902 | 58525 | WIZ | exon_16_c | chr19:15423075-15423235 | chr19:15423225-15423244 | CCCAUGCAGGUUCUGUGAGG | - |
| 2903 | 58525 | WIZ | exon_16_c | chr19:15423075-15423235 | chr19:15423186-15423205 | CCCACUCUUCCUGGAUGGAG | + |
| 2904 | 58525 | WIZ | exon_16_c | chr19:15423075-15423235 | chr19:15423181-15423200 | CCGCACCCACUCUU CCUGGA | + |
| 2905 | 58525 | WIZ | exon_16_c | chr19:15423075-15423235 | chr19:15423124-15423143 | CUCAGGUGGGGGGUCCGCUU | + |
| 2906 | 58525 | WIZ | exon_16_c | chr19:15423075-15423235 | chr19:15423114-15423133 | CCUGGGACUCCUCAGGUGGG | + |
| 2907 | 58525 | WIZ | exon_16_nc .1 | chr19:15422090-15423075 | chr19:15422961-15422980 | GAGGUUUUGGCUUGCUCCUU | + |
| 2908 | 58525 | WIZ | exon_16_nc .1 | chr19:15422090-15423075 | chr19:15422957-15422976 | AGCAAGCCAAAACC UCAAAC | - |
| 2909 | 58525 | WIZ | exon_16_nc .1 | chr19:15422090-15423075 | chr19:15422935-15422954 | GCCCGGCCCCCAAG GGGCGC | + |
| 2910 | 58525 | WIZ | exon_16_nc .1 | chr19:15422090-15423075 | chr19:15422946-15422965 | ACCUCAAACCGGCG CCCCUU | - |
| 2911 | 58525 | WIZ | exon_16_nc .1 | chr19:15422090-15423075 | chr19:15422877-15422896 | GAGUCCUCGGGCUGGGGGAA | + |
| 2912 | 58525 | WIZ | exon_16_nc .1 | chr19:15422090-15423075 | chr19:15422870-15422889 | GGCCCCAGAGUCCUCGGGCU | + |
| 2913 | 58525 | WIZ | exon_16_nc .1 | chr19:15422090-15423075 | chr19:15422876-15422895 | UCCCCCAGCCCGAG GACUCU | - |
| 2914 | 58525 | WIZ | exon_16_nc .1 | chr19:15422090-15423075 | chr19:15422795-15422814 | GUCUCUGAUGGCAGCCGGUC | - |
| 2915 | 58525 | WIZ | exon_16_nc .1 | chr19:15422090-15423075 | chr19:15422661-15422680 | UGUGUGAGAGGAUAUUCAUG | + |
| 2916 | 58525 | WIZ | exon_16_nc .1 | chr19:15422090-15423075 | chr19:15422609-15422628 | GGCAGGUCCCGGGUCUCACG | + |
| 2917 | 58525 | WIZ | exon_16_nc .1 | chr19:15422090-15423075 | chr19:15422444-15422463 | AGCUGGGAAGGCCCCUCUCG | + |
| 2918 | 58525 | WIZ | exon_16_nc .1 | chr19:15422090-15423075 | chr19:15422444-15422463 | CGAGAGGGGCCUUCCCAGCU | - |
| 2919 | 58525 | WIZ | exon_16_nc .1 | chr19:15422090-15423075 | chr19:15422396-15422415 | GGGGGCCUUGACAUGGCAGG | + |
| 2920 | 58525 | WIZ | exon_16_nc .1 | chr19:15422090-15423075 | chr19:15422404-15422423 | AGCUGCCUCCUGCCAUGUCA | - |
| 2921 | 58525 | WIZ | exon_16_nc .1 | chr19:15422090-15423075 | chr19:15422377-15422396 | GAGCCCCUGAGGCUCUUUGG | + |
| 2922 | 58525 | WIZ | exon_16_nc .1 | chr19:15422090-15423075 | chr19:15422375-15422394 | CAGAGCCCCUGAGGCUCUUU | + |
| 2923 | 58525 | WIZ | exon_16_nc .1 | chr19:15422090-15423075 | chr19:15422384-15422403 | AGGCCCCCCAAAGA GCCUCA | - |
| 2924 | 58525 | WIZ | exon_16_nc .1 | chr19:15422090-15423075 | chr19:15422256-15422275 | CGCGUUUUUAAAAAAGUGAA | + |
| 2925 | 58525 | WIZ | exon_16_nc .1 | chr19:15422090-15423075 | chr19:15422233-15422252 | UGUGUAGAGAAUAAGGAACG | - |
| 2926 | 58525 | WIZ | exon_16_nc .1 | chr19:15422090-15423075 | chr19:15422151-15422170 | UUUUUUCAGUGGCCACAUUU | - |
| 2927 | 58525 | WIZ | exon_16_nc .1 | chr19:15422090-15423075 | chr19:15422091-15422110 | UUUCUCUUCUGGAAACACCC | - |
| 2928 | 58525 | WIZ | exon_16_nc .2 | chr19:15422086-15422090 | chr19:15422070-15422089 | ACACGCUGGCCGCC UGCCCC | + |
| 2929 | 58525 | WIZ | exon_16_nc .3 | chr19:15421507-15422086 | chr19:15422056-15422075 | CUUGACAGAAAAACACACGC | + |
| 2930 | 58525 | WIZ | exon_16_nc .3 | chr19:15421507-15422086 | chr19:15422047-15422066 | UUUCUGUCAAGUGGACAGGC | - |
| 2931 | 58525 | WIZ | exon_16_nc .3 | chr19:15421507-15422086 | chr19:15422041-15422060 | UCAAGUGGACAGGCUGGCAU | - |
| 2932 | 58525 | WIZ | exon_16_nc .3 | chr19:15421507-15422086 | chr19:15422037-15422056 | GUGGACAGGCUGGCAUUGGC | - |
| 2933 | 58525 | WIZ | exon_16_nc .3 | chr19:15421507-15422086 | chr19:15422028-15422047 | CUGGCAUUGGCUGGCAGCCG | - |
| 2934 | 58525 | WIZ | exon_16_nc .3 | chr19:15421507-15422086 | chr19:15422024-15422043 | CAUUGGCUGGCAGCCGGGGC | - |
| 2935 | 58525 | WIZ | exon_16_nc .3 | chr19:15421507-15422086 | chr19:15421980-15421999 | CCAGGGCCUCCAUGGCGCUC | + |
| 2936 | 58525 | WIZ | exon_16_nc .3 | chr19:15421507-15422086 | chr19:15421992-15422011 | CUCCUCUGUCCAGAGCGCCA | - |
| 2937 | 58525 | WIZ | exon_16_nc .3 | chr19:15421507-15422086 | chr19:15421982-15422001 | CAGAGCGCCAUGGAGGCCCU | - |
| 2938 | 58525 | WIZ | exon_16_nc .3 | chr19:15421507-15422086 | chr19:15421911-15421930 | GAGCCAACAGCUGGGAACUU | + |
| 2939 | 58525 | WIZ | exon_16_nc .3 | chr19:15421507-15422086 | chr19:15421917-15421936 | GAGCCCAAGUUCCC AGCUGU | - |
| 2940 | 58525 | WIZ | exon_16_nc .3 | chr19:15421507-15422086 | chr19:15421868-15421887 | UCUCUGGCUGGCUGGCAAAG | - |
| 2941 | 58525 | WIZ | exon_16_nc .3 | chr19:15421507-15422086 | chr19:15421845-15421864 | CUCCAGUGAGCAGAUGAACC | - |
| 2942 | 58525 | WIZ | exon_16_nc .3 | chr19:15421507-15422086 | chr19:15421844-15421863 | UCCAGUGAGCAGAUGAACCA | - |
| 2943 | 58525 | WIZ | exon_16_nc .3 | chr19:15421507-15422086 | chr19:15421824-15421843 | AGACAGGCUGCCCAGAACCC | + |
| 2944 | 58525 | WIZ | exon_16_nc .3 | chr19:15421507-15422086 | chr19:15421837-15421856 | AGCAGAUGAACCAGGGUUCU | - |
| 2945 | 58525 | WIZ | exon_16_nc .3 | chr19:15421507-15422086 | chr19:15421787-15421806 | CAAGAAGCAGUUGAGGCUAG | - |
| 2946 | 58525 | WIZ | exon_16_nc .3 | chr19:15421507-15422086 | chr19:15421739-15421758 | CGGGUCCCUGACACCCUCGC | + |
| 2947 | 58525 | WIZ | exon_16_nc .3 | chr19:15421507-15422086 | chr19:15421720-15421739 | CCCACCCAAAUGCU CCCAAC | + |
| 2948 | 58525 | WIZ | exon_16_nc .3 | chr19:15421507-15422086 | chr19:15421719-15421738 | CCCCACCCAAAUGC UCCCAA | + |
| 2949 | 58525 | WIZ | exon_16_nc .3 | chr19:15421507-15422086 | chr19:15421721-15421740 | CGUUGGGAGCAUUUGGGUGG | - |
| 2950 | 58525 | WIZ | exon_16_nc .3 | chr19:15421507-15422086 | chr19:15421695-15421714 | CCAGCUCUCUACAA CCCCAC | + |
| 2951 | 58525 | WIZ | exon_16_nc .3 | chr19:15421507-15422086 | chr19:15421625-15421644 | CCCGCAUGUUCCUUGGGUCA | + |
| 2952 | 58525 | WIZ | exon_16_nc .3 | chr19:15421507-15422086 | chr19:15421638-15421657 | ACACAUGCACCCCU GACCCA | - |
| 2953 | 58525 | WIZ | exon_16_nc .3 | chr19:15421507-15422086 | chr19:15421624-15421643 | CCCCGCAUGUUCCUUGGGUC | + |
| 2954 | 58525 | WIZ | exon_16_nc .3 | chr19:15421507-15422086 | chr19:15421627-15421646 | CCUGACCCAAGGAA CAUGCG | - |
| 2955 | 58525 | WIZ | exon_16_nc .3 | chr19:15421507-15422086 | chr19:15421610-15421629 | GCGGGGAAAAGAGGAGCCAC | - |
| 2956 | 58525 | WIZ | exon_16_nc .3 | chr19:15421507-15422086 | chr19:15421582-15421601 | GAAAAUAAAUAACAUCGCAA | + |
| 2957 | 58525 | WIZ | exon_16_nc .5 | chr19:15419979-15421506 | chr19:15421458-15421477 | AACGGUCAAGUGCUGGAGAG | - |
| 2958 | 58525 | WIZ | exon_16_nc .5 | chr19:15419979-15421506 | chr19:15421457-15421476 | ACGGUCAAGUGCUGGAGAGU | - |
| 2959 | 58525 | WIZ | exon_16_nc .5 | chr19:15419979-15421506 | chr19:15421429-15421448 | CCUCAUGGCGUGUGGACAGA | - |
| 2960 | 58525 | WIZ | exon_16_nc .5 | chr19:15419979-15421506 | chr19:15421428-15421447 | CUCAUGGCGUGUGGACAGAA | - |
| 2961 | 58525 | WIZ | exon_16_nc .5 | chr19:15419979-15421506 | chr19:15421366-15421385 | CUUCCCAGGAAGGGGUAUGG | + |
| 2962 | 58525 | WIZ | exon_16_nc .5 | chr19:15419979-15421506 | chr19:15421365-15421384 | CAUACCCCUUCCUG GGAAGG | - |
| 2963 | 58525 | WIZ | exon_16_nc .5 | chr19:15419979-15421506 | chr19:15421364-15421383 | AUACCCCUUCCUGGGAAGGA | - |
| 2964 | 58525 | WIZ | exon_16_nc .5 | chr19:15419979-15421506 | chr19:15421355-15421374 | CCUGGGAAGGAGGGAUUAAC | - |
| 2965 | 58525 | WIZ | exon_16_nc .5 | chr19:15419979-15421506 | chr19:15421331-15421350 | UGCAAUAACGCCCA CAAGGG | - |
| 2966 | 58525 | WIZ | exon_16_nc .5 | chr19:15419979-15421506 | chr19:15421298-15421317 | ACCCCACAGGAGCA GACGUG | + |
| 2967 | 58525 | WIZ | exon_16_nc .5 | chr19:15419979-15421506 | chr19:15421212-15421231 | GGUGGAUGUAUCCAGGACUU | - |
| 2968 | 58525 | WIZ | exon_16_nc .5 | chr19:15419979-15421506 | chr19:15420826-15420845 | UCAAAAACUGACUUACGGGC | + |
| 2969 | 58525 | WIZ | exon_16_nc .5 | chr19:15419979-15421506 | chr19:15420822-15420841 | UAUUUCAAAAACUGACUUAC | + |
| 2970 | 58525 | WIZ | exon_16_nc .5 | chr19:15419979-15421506 | chr19:15420810-15420829 | UUGAAAUAUAAAAGUGGUAU | - |
| 2971 | 58525 | WIZ | exon_16_nc .5 | chr19:15419979-15421506 | chr19:15420757-15420776 | CAAGAGCUUAUAAAGUCAUA | - |
| 2972 | 58525 | WIZ | exon_16_nc .5 | chr19:15419979-15421506 | chr19:15420717-15420736 | CCCUCACUUCACUG CAUGAU | + |
| 2973 | 58525 | WIZ | exon_16_nc .5 | chr19:15419979-15421506 | chr19:15420684-15420703 | AACUGGAGGUGACUCUUCCA | + |
| 2974 | 58525 | WIZ | exon_16_nc .5 | chr19:15419979-15421506 | chr19:15420667-15420686 | AAACAUCCCCCUGC AAGAAC | + |
| 2975 | 58525 | WIZ | exon_16_nc .5 | chr19:15419979-15421506 | chr19:15420679-15420698 | GAGUCACCUCCAGUUCUUGC | - |
| 2976 | 58525 | WIZ | exon_16_nc .5 | chr19:15419979-15421506 | chr19:15420612-15420631 | AAGCCACUUCAAUACACCUC | - |
| 2977 | 58525 | WIZ | exon_16_nc .5 | chr19:15419979-15421506 | chr19:15420593-15420612 | AGCUGAGACUUUGCUGCCUG | + |
| 2978 | 58525 | WIZ | exon_16_nc .5 | chr19:15419979-15421506 | chr19:15420564-15420583 | UCCAACACCCUCAG AGACCA | + |
| 2979 | 58525 | WIZ | exon_16_nc .5 | chr19:15419979-15421506 | chr19:15420568-15420587 | GCCGUGGUCUCUGAGGGUGU | - |
| 2980 | 58525 | WIZ | exon_16_nc .5 | chr19:15419979-15421506 | chr19:15420547-15420566 | GGAUGUGAACGAAAUCAAAU | - |
| 2981 | 58525 | WIZ | exon_16_nc .5 | chr19:15419979-15421506 | chr19:15420515-15420534 | GACUGUGGCAAGUGCGAUGA | - |
| 2982 | 58525 | WIZ | exon_16_nc .5 | chr19:15419979-15421506 | chr19:15420460-15420479 | CCAAACCAAGGCAG GGCCCC | + |
| 2983 | 58525 | WIZ | exon_16_nc .5 | chr19:15419979-15421506 | chr19:15420453-15420472 | CUGUCUUCCAAACCAAGGCA | + |
| 2984 | 58525 | WIZ | exon_16_nc .5 | chr19:15419979-15421506 | chr19:15420448-15420467 | CCUGCCUGUCUUCCAAACCA | + |
| 2985 | 58525 | WIZ | exon_16_nc .5 | chr19:15419979-15421506 | chr19:15420455-15420474 | CCUGCCUUGGUUUGGAAGAC | - |
| 2986 | 58525 | WIZ | exon_16_nc .5 | chr19:15419979-15421506 | chr19:15420431-15420450 | AGGCAUCCCUGAGGCUGAUG | - |
| 2987 | 58525 | WIZ | exon_16_nc .5 | chr19:15419979-15421506 | chr19:15420304-15420323 | GUUCUGCAGAAGCCUCAUUU | - |
| 2988 | 58525 | WIZ | exon_16_nc .5 | chr19:15419979-15421506 | chr19:15420300-15420319 | UGCAGAAGCCUCAUUUGGGU | - |
| 2989 | 58525 | WIZ | exon_16_nc .5 | chr19:15419979-15421506 | chr19:15420298-15420317 | CAGAAGCCUCAUUUGGGUGG | - |
| 2990 | 58525 | WIZ | exon_16_nc .5 | chr19:15419979-15421506 | chr19:15420192-15420211 | CAUUGGUCAUGGGUUGGUGA | + |
| 2991 | 58525 | WIZ | exon_16_nc .5 | chr19:15419979-15421506 | chr19:15420181-15420200 | ACAGCUGAAGACAUUGGUCA | + |

TABLE 3

| SEQ ID NO | target_gene_id | target_symbol | target_region_name | target_region_coordinates | gRNA_target_site_coordinates | gRNA Targeting Domain | strand |
|---|---|---|---|---|---|---|---|
| 2992 | 58525 | WIZ | promoter | chr19:15449951-15451624 | ch r19:15450806-15450825 | UGGGCGGAAAGCAUGUGUGUG | - |
| 2993 | 58525 | WIZ | promoter | chr19:15449951-15451624 | chr19:15450139-15450158 | AGGCCGUGCGGGCCCUUUAA | - |
| 2994 | 58525 | WIZ | promoter | chr19:15449951-15451624 | chr19:15450015-15450034 | GCCGCGCCGCCAUGAUGGGG | + |
| 2995 | 58525 | WIZ | exon_02_nc | chr19:15449466-15449608 | chr19:15449556-15449575 | CCUGCCCCGGGGUGCACGGG | - |
| 2996 | 58525 | WIZ | intron_03 | chr19:15442748-15448102 | chr19:15446575-15446594 | CACCAGCUACCUCUAAGCCUC | + |
| 2997 | 58525 | WIZ | intron_03 | chr19:15442748-15448102 | chr19:15446286-15446305 | AGAAGAGAUGLCCAAUCCCUJ | + |
| 2998 | 58525 | WIZ | intron_03 | chr19:15442748-15448102 | chr19:15446042-15446061 | CUGAAUGUUGGCAAGAAUGCC | - |
| 2999 | 58525 | WIZ | intron_03 | chr19:15442748-15448102 | chr19:15445900-15445919 | GCUAUUCCACCCCAAAGCCU | - |
| 3000 | 58525 | WIZ | intron_03 | chr19:15442748-15448102 | chr19:15445219-15445238 | AGCAGCCUGAACUCCAAGCC | + |
| 3001 | 58525 | WIZ | intron_03 | chr19:15442748-15448102 | chr19:15444103-15444122 | AAUCCAACAAUUGCAUCUGU | - |
| 3002 | 58525 | WIZ | intron_03 | chr19:15442748-15448102 | chr19:15442863-15442882 | UCCUCUCCCUGCAGAGGCCCG | + |
| 3003 | 58525 | WIZ | intron_04 | chr19:15440715-15442675 | chr19:15440952-15440971 | CAUUCCCCCACAAUGCAGCG | - |
| 3004 | 58525 | WIZ | exon_05_c | chr19:15438577-15440715 | chr19:15440626-15440645 | CCCCGGCCAUCAGGGGUACC | + |
| 3005 | 58525 | WIZ | exon_05_c | chr19:15438577-15440715 | chr19:15440629-15440648 | CCAGGUACCCCUGAUGGCCG | - |
| 3006 | 58525 | WIZ | exon_05_c | chr19:15438577-15440715 | chr19:15440471-15440490 | CCAAAAGCCUUGGUUCCCCC | + |
| 3007 | 58525 | WIZ | exon_05_c | chr19:15438577-15440715 | chr19:15438898-15438917 | CUGGCUGCCGCCAUGACCUG | + |
| 3008 | 58525 | WIZ | exon_05_c | chr19:15438577-15440715 | chr19:15438615-15438634 | AAUGGCCUUCACCUCCUCAG | + |
| 3009 | 58525 | WIZ | intron_05 | chr19:15437129-15438577 | chr19:15438085-15438104 | UCCAACAGGACCACCCUGGGG | - |
| 3010 | 58525 | WIZ | exon_06_c.2 | chr19:15436805-15436933 | chr19:15436899-15436918 | CAGGCGGACCCCCAGGCUCU | + |
| 3011 | 58525 | WIZ | intron_06 | chr19:15433290-15436805 | chr19:15434659-15434678 | AAUGGAGAGUGCUCUGAACAG | - |
| 3012 | 58525 | WIZ | intron_06 | chr19:15433290-15436805 | chr19:15433911-15433930 | UGAGCCCAGAGCUACAGAUCU | + |
| 3013 | 58525 | WIZ | intron_08 | chr19:15431182-15432433 | chr19:15431890-15431909 | CUAGUUGUUCAAAGGGGCCU | + |
| 3014 | 58525 | WIZ | intron_08 | chr19:15431182-15432433 | chr19:15431269-15431288 | CAGAGUGAGAGCCGGACAUCA | - |
| 3015 | 58525 | WIZ | exon_09_c .1/nc | chr19:15431159-15431182 | chr19:15431159-15431178 | GGGUUCUGAGGAAAACGCAA | - |
| 3016 | 58525 | WIZ | exon_09_c .2 | chr19:15431150-15431159 | chr19:15431156-15431175 | UUCUGAGGAAAACGCAAUGG | - |
| 3017 | 58525 | WIZ | exon_09_c .3 | chr19:15431011-15431150 | chr19:15431075-15431094 | GCCGACUGGCCACCUGCUCC | + |
| 3018 | 58525 | WIZ | exon_09_c .3 | chr19:15431011-15431150 | chr19:15431061-15431080 | CACUUUGCUGCUCAGCCGAC | + |
| 3019 | 58525 | WIZ | exon_09_c .3 | chr19:15431011-15431150 | chr19:15431044-15431063 | GUGGCUGCAGAGGUUCCUCA | - |
| 3020 | 58525 | WIZ | intron_09 | chr19:15430089-15431011 | chr19:15430295-15430314 | GAGGGAAAAGUUGUGCCCAA | + |
| 3021 | 58525 | WIZ | exon_10_c | chr19:15429585-15430089 | chr19:15429937-15429956 | GCUUCACAAGCUCGUAGAGG | + |
| 3022 | 58525 | WIZ | exon_10_c | chr19:15429585-15430089 | chr19:15429880-15429899 | UGGACUUCUUAGCCAGGCCU | + |
| 3023 | 58525 | WIZ | exon_10_c | chr19:15429585-15430089 | chr19:15429788-15429807 | GAUGGCUUUGUUGACAGCAG | + |
| 3024 | 58525 | WIZ | exon_10_c | chr19:15429585-15430089 | chr19:15429786-15429805 | UUGAUGGCUUUGUUGACAGC | + |
| 3025 | 58525 | WIZ | exon_10_c | chr19:15429585-15430089 | chr19:15429757-15429776 | CGGCUUCUCGGCCAAGGGCC | - |
| 3026 | 58525 | WIZ | exon_10_c | chr19:15429585-15430089 | chr19:15429756-15429775 | GGCUUCUCGGCCAAGGGCCU | - |
| 3027 | 58525 | WIZ | exon_10_c | chr19:15429585-15430089 | chr19:15429677-15429696 | CUCAGGAUUCUUAGGGGUAG | + |
| 3028 | 58525 | WIZ | exon_10_c | chr19:15429585-15430089 | chr19:15429676-15429695 | CCUCAGGAUUCUUAGGGGUA | + |
| 3029 | 58525 | WIZ | exon_10_c | chr19:15429585-15430089 | chr19:15429675-15429694 | UCCUCAGGAUUCUUAGGGGU | + |
| 3030 | 58525 | WIZ | exon_10_c | chr19:15429585-15430089 | chr19:15429679-15429698 | CCCUACCCCUAAGAAUCCUG | - |
| 3031 | 58525 | WIZ | intron_10 | chr19:15428508-15429585 | chr19:15429062-15429081 | ACCCUGCCUGCCGUGCCCAC | + |
| 3032 | 58525 | WIZ | exon_11_c | chr19:15428109-15428508 | chr19:15428312-15428331 | UCCAGAUCCGCCUCCCACCC | - |
| 3033 | 58525 | WIZ | exon_11_c | chr19:15428109-15428508 | chr19:15428236-15428255 | CUUGCUUCCCCCCCCACCGC | - |
| 3034 | 58525 | WIZ | exon_12_c | chr19:15426981-15427533 | chr19:15427351-15427370 | GAGACUGGGUCCGUCUCUUC | + |
| 3035 | 58525 | WIZ | exon_12_c | chr19:15426981-15427533 | chr19:15427364-15427383 | UGCGGGAGAUCCUGAAGAGA | - |
| 3036 | 58525 | WIZ | exon_12_c | chr19:15426981-15427533 | chr19:15427305-15427324 | AGGGCUUUUGGGCUUGGCCC | + |
| 3037 | 58525 | WIZ | exon_12_c | chr19:15426981-15427533 | chr19:15427286-15427305 | GCCGCCCAUCAUCUUGGCCA | + |
| 3038 | 58525 | WIZ | exon_12_c | chr19:15426981-15427533 | chr19:15427290-15427309 | GCCCUGGCCAAGAUGAUGGG | - |
| 3039 | 58525 | WIZ | exon_12_c | chr19:15426981-15427533 | chr19:15427257-15427276 | CGGGCUUCCAGUGAGCUGCC | + |
| 3040 | 58525 | WIZ | exon_12_c | chr19:15426981-15427533 | chr19:15427238-15427257 | GUGAAGGUCCGAGGGGCUGC | + |
| 3041 | 58525 | WIZ | exon_12_c | chr19:15426981-15427533 | chr19:15427231-15427250 | GUGAGAUGUGAAGGUCCGAG | + |
| 3042 | 58525 | WIZ | exon_12_c | chr19:15426981-15427533 | chr19:15427230-15427249 | GGUGAGAUGUGAAGGUCCGA | + |
| 3043 | 58525 | WIZ | exon_12_c | chr19:15426981-15427533 | chr19:15427228-15427247 | GGACCUUCACAUCUCACCCU | - |
| 3044 | 58525 | WIZ | exon_12_c | chr19:15426981-15427533 | chr19:15427209-15427228 | GGUGGCAACUUCUUGGCCAA | + |
| 3045 | 58525 | WIZ | exon_12_c | chr19:15426981-15427533 | chr19:15427202-15427221 | CGGUGGUGGUGGCAACUUCU | + |
| 3046 | 58525 | WIZ | exon_12_c | chr19:15426981-15427533 | chr19:15427049-15427068 | UGCUGCCGGGGGCCCUUCAU | - |
| 3047 | 58525 | WIZ | exon_12_c | chr19:15426981-15427533 | chr19:15427048-15427067 | GCUGCCGGGGGCCCUUCAUG | - |
| 3048 | 58525 | WIZ | exon_12_c | chr19:15426981-15427533 | chr19:15427022-15427041 | UGCACCCAUCUGAGGGUCCC | - |
| 3049 | 58525 | WIZ | exon_12_c | chr19:15426981-15427533 | chr19:15427002-15427021 | UCUUCCCGUGGUGCCCCCCA | + |
| 3050 | 58525 | WIZ | exon_13_c | chr19:15425240-15425768 | chr19:15425565-15425584 | CCUCAUCAAGAAGGAGCCAC | - |
| 3051 | 58525 | WIZ | exon_13_c | chr19:15425240-15425768 | chr19:15425402-15425421 | CUCAGCCUGACGCCCAUCAC | - |
| 3052 | 58525 | WIZ | exon_13_c | chr19:15425240-15425768 | chr19:15425274-15425293 | CCUUGAAGGGCAGUUCAGUC | + |
| 3053 | 58525 | WIZ | intron_13 | chr19:15425032-15425240 | chr19:15425192-15425211 | GGCGACCGCCAGGGCCUGCC | - |
| 3054 | 58525 | WIZ | exon_14_c | chr19:15424612-15425032 | chr19:15424979-15424998 | CUUUGAAAACCGCAAGGCCC | - |
| 3055 | 58525 | WIZ | exon_14_c | chr19:15424612-15425032 | chr19:15424964-15424983 | GGCCCUGGCCAGCCACGCAC | - |
| 3056 | 58525 | WIZ | exon_14_c | chr19:15424612-15425032 | chr19:15424932-15424951 | GGCAGUUCGGCGUGACCGAG | - |
| 3057 | 58525 | WIZ | exon_14_c | chr19:15424612-15425032 | chr19:15424891-15424910 | CACUCGCUCAGUGUCUCGAU | + |
| 3058 | 58525 | WIZ | exon_14_c | chr19:15424612-15425032 | chr19:15424890-15424909 | CCACUCGCUCAGUGUCUCGA | + |
| 3059 | 58525 | WIZ | exon_14_c | chr19:15424612-15425032 | chr19:15424823-15424842 | UGGUGAAGGGGCGGCCGCCC | + |
| 3060 | 58525 | WIZ | exon_14_c | chr19:15424612-15425032 | chr19:15424811-15424830 | UGCGGAACUUCUUGGUGAAG | + |
| 3061 | 58525 | WIZ | exon_14_c | chr19:15424612-15425032 | chr19:15424809-15424828 | ACUGCGGAACUUCUUGGUGA | + |
| 3062 | 58525 | WIZ | exon_14_c | chr19:15424612-15425032 | chr19:15424807-15424826 | ACCAAGAAGUUCCGCAGUGC | - |
| 3063 | 58525 | WIZ | exon_14_c | chr19:15424612-15425032 | chr19:15424785-15424804 | GUCACUGUCACGGCCAUGGC | + |
| 3064 | 58525 | WIZ | exon_14_c | chr19:15424612-15425032 | chr19:15424737-15424756 | GCCGACCACGGCCAGGCCCC | + |
| 3065 | 58525 | WIZ | intron_14 | chr19:15424378-15424612 | chr19:15424378-15424397 | UCUAAGGUGGAGAGGGGGAC | + |
| 3066 | 58525 | WIZ | exon_15_c | chr19:15424182-15424378 | chr19:15424335-15424354 | CUCCAGAUGCCUCCGCAGCC | - |
| 3067 | 58525 | WIZ | exon_15_c | chr19:15424182-15424378 | chr19:15424333-15424352 | CCAGAUGCCUCCGCAGCCCG | - |
| 3068 | 58525 | WIZ | exon_15_c | chr19:15424182-15424378 | chr19:15424212-15424231 | GAACUUGACAAGUGAUGUCU | + |
| 3069 | 58525 | WIZ | exon_16_c | chr19:15423075-15423235 | chr19:15423177-15423196 | AGUGCCGCACCCACUCUUCC | + |
| 3070 | 58525 | WIZ | exon_16_c | chr19:15423075-15423235 | chr19:15423189-15423208 | CCUCUCCAUCCAGGAAGAGU | - |
| 3071 | 58525 | WIZ | exon_16_c | chr19:15423075-15423235 | chr19:15423172-15423191 | AGUGGGUGCGGCACUUACAG | - |
| 3072 | 58525 | WIZ | exon_16_c | chr19:15423075-15423235 | chr19:15423090-15423109 | CCGCCGCUGUCUGUGCCUGC | + |
| 3073 | 58525 | WIZ | exon_16_c | chr19:15423075-15423235 | chr19:15423093-15423112 | CCCGCAGGCACAGACAGCGG | - |
| 3074 | 58525 | WIZ | exon_16_c | chr19:15423075-15423235 | chr19:15423087-15423106 | GGCACAGACAGCGGCGGCAG | - |
| 3075 | 58525 | WIZ | exon_16_n c.1 | chr19:15422090-15423075 | chr19:15423035-15423054 | AGACAGAGGUGGCACGAGAG | + |
| 3076 | 58525 | WIZ | exon_16_n c.1 | chr19:15422090-15423075 | chr19:15423000-15423019 | GAAGAGGGACAAGGACACAG | + |
| 3077 | 58525 | WIZ | exon_16_n c.1 | chr19:15422090-15423075 | chr19:15422948-15422967 | GGGGCGCCGGUUUGAGGUUU | + |
| 3078 | 58525 | WIZ | exon_16_n c.1 | chr19:15422090-15423075 | chr19:15422929-15422948 | UAGUGUGCCCGGCCCCCAAG | + |
| 3079 | 58525 | WIZ | exon_16_n c.1 | chr19:15422090-15423075 | chr19:15422928-15422947 | GUAGUGUGCCCGGCCCCCAA | + |
| 3080 | 58525 | WIZ | exon_16_n c.1 | chr19:15422090-15423075 | chr19:15422927-15422946 | UGUAGUGUGCCCGGCCCCCA | + |
| 3081 | 58525 | WIZ | exon_16_n c.1 | chr19:15422090-15423075 | chr19:15422924-15422943 | GGGCCGGGCACACUACAGCC | - |
| 3082 | 58525 | WIZ | exon_16_n c.1 | chr19:15422090-15423075 | chr19:15422923-15422942 | GGCCGGGCACACUACAGCCA | - |
| 3083 | 58525 | WIZ | exon_16_n c.1 | chr19:15422090-15423075 | chr19:15422778-15422797 | GUCCUCCCCUGUGACCAGAC | + |
| 3084 | 58525 | WIZ | exon_16_n c.1 | chr19:15422090-15423075 | chr19:15422787-15422806 | UGGCAGCCGGUCUGGUCACA | - |
| 3085 | 58525 | WIZ | exon_16_n c.1 | chr19:15422090-15423075 | chr19:15422786-15422805 | GGCAGCCGGUCUGGUCACAG | - |
| 3086 | 58525 | WIZ | exon_16_n c.1 | chr19:15422090-15423075 | chr19:15422783-15422802 | AGCCGGUCUGGUCACAGGGG | - |
| 3087 | 58525 | WIZ | exon_16_n c.1 | chr19:15422090-15423075 | chr19:15422756-15422775 | CACUCCCCCGUCUAGCAGCC | - |
| 3088 | 58525 | WIZ | exon_16_n c.1 | chr19:15422090-15423075 | chr19:15422732-15422751 | AGGGCGAUGUCUGCCAUCCG | - |
| 3089 | 58525 | WIZ | exon_16_n c.1 | chr19:15422090-15423075 | chr19:15422692-15422711 | GAACCAGAACAGGGGUCUUU | + |
| 3090 | 58525 | WIZ | exon_16_n c.1 | chr19:15422090-15423075 | chr19:15422662-15422681 | GUGUGAGAGGAUAUUCAUGG | + |
| 3091 | 58525 | WIZ | exon_16_n c.1 | chr19:15422090-15423075 | chr19:15422620-15422639 | AACACGCACCUCGUGAGACC | - |
| 3092 | 58525 | WIZ | exon_16_n c.1 | chr19:15422090-15423075 | chr19:15422619-15422638 | ACACGCACCUCGUGAGACCC | - |
| 3093 | 58525 | WIZ | exon_16_n c.1 | chr19:15422090-15423075 | chr19:15422580-15422599 | GUCGUUCAACCCAGGAACUG | + |
| 3094 | 58525 | WIZ | exon_16_n c.1 | chr19:15422090-15423075 | chr19:15422579-15422598 | GGUCGUUCAACCCAGGAACU | + |
| 3095 | 58525 | WIZ | exon_16_n c.1 | chr19:15422090-15423075 | chr19:15422578-15422597 | UGGUCGUUCAACCCAGGAAC | + |
| 3096 | 58525 | WIZ | exon_16_n c.1 | chr19:15422090-15423075 | chr19:15422558-15422577 | GCAAGCACCGUGGCAUGAUG | + |
| 3097 | 58525 | WIZ | exon_16_n c.1 | chr19:15422090-15423075 | chr19:15422548-15422567 | CUUCCCCUGAGCAAGCACCG | + |
| 3098 | 58525 | WIZ | exon_16_n c.1 | chr19:15422090-15423075 | chr19:15422555-15422574 | CAUGCCACGGUGCUUGCUCA | - |
| 3099 | 58525 | WIZ | exon_16_n c.1 | chr19:15422090-15423075 | chr19:15422554-15422573 | AUGCCACGGUGCUUGCUCAG | - |
| 3100 | 58525 | WIZ | exon_16_n c.1 | chr19:15422090-15423075 | chr19:15422485-15422504 | CGUGGCAUUGUGGGCUCAGU | + |
| 3101 | 58525 | WIZ | exon_16_n c.1 | chr19:15422090-15423075 | chr19:15422459-15422478 | CUUGUUGGCUGCCCCCGAGA | - |
| 3102 | 58525 | WIZ | exon_16_n c.1 | chr19:15422090-15423075 | chr19:15422172-15422191 | UUAAAAGGUCAAUCAGCUCC | + |
| 3103 | 58525 | WIZ | exon_16_n c.1 | chr19:15422090-15423075 | chr19:15422157-15422176 | GGCCACUGAAAAAAGUUAAA | + |
| 3104 | 58525 | WIZ | exon_16_n c.1 | chr19:15422090-15423075 | ch r19:15422162-15422181 | GACCUUUUAACUUUUUUCAG | - |
| 3105 | 58525 | WIZ | exon_16_n c.1 | chr19:15422090-15423075 | chr19:15422136-15422155 | GUACAUCGAUAACCAAAAUG | + |
| 3106 | 58525 | WIZ | exon_16_n c.3 | chr19:15421507-15422086 | chr19:15421891-15421910 | UUUAGGCCAUGGCUGGGAGG | - |

1. A gRNA molecule comprising a tracr and crRNA, wherein the crRNA comprises a targeting domain that is complementary with a target sequence of a widely-interspaced zinc finger-containing protein (WIZ) gene (e.g., a human WIZ gene).

2. The gRNA molecule of claim 1, wherein the WIZ gene comprises a genomic nucleic acid sequence at Chr19:15419978-15451624, - strand, hg38.

3. A gRNA molecule of any one of claims 1-2, wherein the targeting domain comprises, e.g., consists of, any one of SEQ ID NO: 1 to SEQ ID NO: 3106, or a fragment thereof.

4. A gRNA molecule of any one of claims 1-2, wherein the targeting domain comprises, e.g., consists of, any one of SEQ ID NO: 1 to SEQ ID NO: 3106.

5. A gRNA molecule of claim 1, wherein the targeting domain comprises, e.g., consists of, any one of SEQ ID NO: 1488, SEQ ID NO: 1565, SEQ ID NO: 2801, SEQ ID NO: 2809, SEQ ID NO: 3071 or a fragment thereof.

6. The gRNA molecule of any of claims 2-5, wherein the targeting domain comprises, e.g., consists of, 17, 18, 19, or 20 consecutive nucleic acids of any one of said targeting domain sequences.

7. The gRNA molecule of claim 6, wherein the 17, 18, 19, or 20 consecutive nucleic acids of any one of said targeting domain sequences are the 17, 18, 19, or 20 consecutive nucleic acids disposed at the 3′ end of said targeting domain sequence.

8. The gRNA molecule of claim 6, wherein the 17, 18, 19, or 20 consecutive nucleic acids of any one of said targeting domain sequences are the 17, 18, 19, or 20 consecutive nucleic acids disposed at the 5′ end of said targeting domain sequence.

9. The gRNA molecule of claim 6, wherein the 17, 18, 19, or 20 consecutive nucleic acids of any one of said targeting domain sequences do not comprise either the 5′ or 3′ nucleic acid of said targeting domain sequence.

10. The gRNA molecule of any of claims 2-9, wherein the targeting domain consists of said targeting domain sequence.

11. The gRNA molecule of any preceding claim, wherein the gRNA molecule is a dual guide RNA molecule.

12. The gRNA molecule of any preceding claim, wherein the gRNA molecule is a single guide RNA molecule.

13. The gRNA molecule of claim 12, comprising:
(a) SEQ ID NO: 3123;
(b) SEQ ID NO: 3159; or
(c) any of (a) or (b), above, further comprising, at the 3′ end, 1, 2, 3, 4, 5, 6 or 7 uracil (U) nucleotides;
wherein the sequence of any of (a) to (c) is disposed 3′, optionally immediately 3′, to the targeting domain.

14. A gRNA molecule of claim 1, comprising, e.g., consisting of:
(a) a tracr comprising, e.g., consisting of, SEQ ID NO: 3152; or
(b) a tracr comprising, e.g., consisting of, SEQ ID NO: 3109 or 3174.

15. A gRNA molecule of any preceding claim, wherein
a) when a CRISPR system (e.g., an RNP as described herein) comprising the gRNA molecule is introduced into a cell, an indel is formed at or near the target sequence complementary to the targeting domain of the gRNA molecule; and/or
b) when a CRISPR system (e.g., an RNP as described herein) comprising the gRNA molecule is introduced into a cell, a deletion is created comprising sequence, e.g., comprising substantially all the sequence, between a sequence complementary to the gRNA targeting domain (e.g., at least 90% complementary to the gRNA targeting domain, e.g., fully complementary to the gRNA targeting domain) in the WIZ gene.

16. A gRNA molecule of any proceding claim, wherein when a CRISPR system (e.g., an RNP as described herein) comprising the gRNA molecule is introduced into a population of cells, an indel is formed at or near the target sequence complementary to the targeting domain of the gRNA molecule in at least about 15%, e.g., at least about 17%, e.g., at least about 20%, e.g., at least about 30%, e.g., at least about 40%, e.g., at least about 50%, e.g., at least about 55%, e.g., at least about 60%, e.g., at least about 70%, e.g., at least about 75%, of the cells of the population.

17. A gRNA molecule of any proceding claim, wherein when a CRISPR system (e.g., an RNP as described herein) comprising the gRNA molecule is introduced into a cell (e g, a population of cells):
(a) expression of fetal hemoglobin is increased in said cell or its progeny, e.g., its erythroid progeny, e.g., its red blood cell progeny, optionally wherein said expression of fetal hemoglobin is increased by at least about 15%, e.g., at least about 17%, e.g., at least about 20%, e.g., at least about 25%, e.g., at least about 30%, e.g., at least about 35%, e.g., at least about 40%, relative to the level of expression of fetal hemoglobin in a population of cells to which the gRNA molecule was not introduced or a population of its progeny, e.g., its erythroid progeny, e.g., its red blood cell progeny;
(b) said cell or population of cells, or its progeny, e.g., its erythroid progeny, e.g., its red blood cell progeny, produces at least about 6 picograms (e.g., at least about 7 picograms, at least about 8 picograms, at least about 9 picograms, at least about 10 picograms, or from about 8 to about 9 picograms, or from about 9 to about 10 picograms) fetal hemoglobin per cell;
(c) no off-target indels are formed in said cell, e.g., no off-target indels are formed outside of the WIZ gene, e.g., as detectible by next generation sequencing and/or a nucleotide insertional assay; and/or
(d) no off-target indel, e.g., no off-target indel outside of the WIZ gene, is detected in more than about 5%, e.g., more than about 1%, e.g., more than about 0.1%, e.g., more than about 0.01%, of the cells of the population of cells, e.g., as detectible by next generation sequencing and/or a nucleotide insertional assay.

18. The gRNA molecule of any proceding claim, wherein the cell is (or population of cells comprises) a mammalian, primate, or human cell, e.g., is a human cell, optionally wherein said cell is obtained from a patient suffering from a hemoglobinopathy, e.g., sickle cell disease or a thalassemia, e.g., beta-thalassemia.

19. The gRNA molecule of claim 18, wherein the cell is (or population of cells comprises) an HSPC, optionally a CD34+ HSPC, optionally a CD34+CD90+ HSPC.

20. The gRNA molecule of any proceding claim, wherein the cell is autologous or allogeneic with respect to a patient to be administered said cell.

21. A composition comprising:
1) one or more gRNA molecules (including a first gRNA molecule) of any of claims 1-20 and a Cas9 molecule;
2) one or more gRNA molecules (including a first gRNA molecule) of any of claims 1-20 and nucleic acid comprising a nucleotide sequence encoding a Cas9 molecule;
3) nucleic acid comprising one or more nucleotide sequences each encoding one gRNA molecule (including a first gRNA molecule) of any of claims 1-20 and a Cas9 molecule;
4) nucleic acid comprising one or more nucleotide sequences each encoding one gRNA molecule (including a first gRNA molecule) of any of claims 1-20 and nucleic acid comprising a nucleotide sequence encoding a Cas9 molecule; or
5) any of 1) to 4), above, and a template nucleic acid; or
6) any of 1) to 4) above, and nucleic acid comprising a nucleotide sequence encoding a template nucleic acid.

22. A composition comprising a first gRNA molecule of any of claims 1-20, further comprising a Cas9 molecule, optionally wherein the Cas9 molecule is an active or inactive s. pyogenes Cas9, optionally wherein the Cas9 molecule comprises SEQ ID NO: 3133 or a sequence with at least 95%, 96%, 97%, 98%, or 99% sequence homology thereto.

23. The composition of any one of claims 21-22, wherein the Cas9 molecule comprises, e.g., consists of:
(a) SEQ ID NO: 3161;
(b) SEQ ID NO: 3162;
(c) SEQ ID NO: 3163;
(d) SEQ ID NO: 3164;
(e) SEQ ID NO: 3165;
(f) SEQ ID NO: 3166;
(g) SEQ ID NO: 3167;
(h) SEQ ID NO: 3168;
(i) SEQ ID NO: 3169;
(j) SEQ ID NO: 3170;
(k) SEQ ID NO: 3171; or
(l) SEQ ID NO: 3172.

24. The composition of any of claims 21-23, wherein the first gRNA molecule and Cas9 molecule are present in a ribonuclear protein complex (RNP).

25. The composition of any of claims 21-24, formulated in a medium suitable for electroporation.

26. The composition of any of claims 21-25, wherein each of said gRNA molecules is in a RNP with a Cas9 molecule described herein, and wherein each of said RNP is at a concentration of less than about 10 uM, e.g., less than about 3 uM, e.g., less than about 1 uM, e.g., less than about 0.5 uM, e.g., less than about 0.3 uM, e.g., less than about 0.1 uM, optionally wherein the concentration of said RNP is about 2 uM or is about 1 uM, optionally wherein the composition further comprises a population of cells, e.g., HSPCs.

27. A nucleic acid sequence that encodes one or more gRNA molecules of any of claims 1-20.

28. A vector comprising the nucleic acid of claim 27, optionally wherein said vector is selected from the group consisting of a lentiviral vector, an adenoviral vector, an adeno-associated viral (AAV) vector, a herpes simplex virus (HSV) vector, a plasmid, a minicircle, a nanoplasmid, and an RNA vector.

29. A method of altering a cell (e.g., a population of cells), (e.g., altering the structure (e.g., sequence) of nucleic acid) at or near a target sequence within said cell, comprising contacting (e.g., introducing into) said cell (e.g., population of cells) with:
1) one or more gRNA molecules of any of claims 1-20 and a Cas9 molecule;
2) one or more gRNA molecules of any of claims 1-20 and nucleic acid comprising a nucleotide sequence encoding a Cas9 molecule;
3) nucleic acid comprising one or more nucleotide sequences each encoding one gRNA molecule of any of claims 1-20 and a Cas9 molecule;
4) nucleic acid comprising one or more nucleotide sequences each encoding one gRNA molecule of any of claims 1-20 and nucleic acid comprising a nucleotide sequence encoding a Cas9 molecule;
5) any of 1) to 4), above, and a template nucleic acid;
6) any of 1) to 4) above, and nucleic acid comprising a nucleotide sequence encoding a template nucleic acid;
7) the composition of any of claims 21-26; or
8) the vector of claim 28.

30. The method of claim 29, wherein the cell is an animal cell, e.g., a mammalian, primate, or human cell, e.g., is a human cell; optionally wherein said cell is obtained from a patient suffering from a hemoglobinopathy, e.g., sickle cell disease or a thalassemia, e.g., beta-thalassemia.

31. The method of any of claims 29-30, wherein the cell is an HSPC, optionally a CD34+ HSPC, optionally a CD34+CD90+ HSPC.

32. The method of any of claims 29-31, wherein the cell is disposed in a composition comprising a population of cells that has been enriched for CD34+ cells.

33. The method of any of claims 29-32, wherein the cell (e g population of cells) has been isolated from bone marrow, peripheral blood (e.g., mobilized peripheral blood), or umbilical cord blood.

34. The method of any of claims 29-33, wherein the cell is autologous or allogeneic with respect to a patient to be administered said cell.

35. The method of any of claims 29-34, wherein:
a) the altering results in an indel at or near a genomic DNA sequence complementary to the targeting domain of the one or more gRNA molecules; and/or
b) the altering results in a deletion comprising sequence, e.g., substantially all the sequence, between a sequence complementary to the targeting domain of the one or more gRNA molecules (e.g., at least 90% complementary to the gRNA targeting domain, e.g., fully complementary to the gRNA targeting domain) in the WIZ gene.

36. The method of any of claims 29-35, wherein:
(a) the method results in a population of cells wherein at least about 15%, e.g., at least about 17%, e.g., at least about 20%, e.g., at least about 30%, e.g., at least about 40%, e.g., at least about 50%, e.g., at least about 55%, e.g., at least about 60%, e.g., at least about 70%, e.g., at least about 75% of the population have been altered, e.g., comprise an indel;
(b) the altering results in a cell (e.g., population of cells) that is capable of differentiating into a differentiated cell of an erythroid lineage (e.g., a red blood cell), and wherein said differentiated cell exhibits an increased level of fetal hemoglobin, e.g., relative to an unaltered cell (e.g., population of cells);
(c) the altering results in a population of cells that is capable of differentiating into a population of differentiated cells, e.g., a population of cells of an erythroid lineage (e.g., a population of red blood cells), and wherein said population of differentiated cells has an increased percentage of F cells (e.g., at least about 15%, at least about 20%, at least about 25%, at least about 30%, or at least about 40% higher percentage of F cells) e.g., relative to a population of unaltered cells; and/or
(d) the altering results in a cell (e.g., population of cells) that is capable of differentiating into a differentiated cell, e.g., a cell of an erythroid lineage (e.g., a red blood cell), and wherein said differentiated cell produces at least about 6 picograms (e.g., at least about 7 picograms, at least about 8 picograms, at least about 9 picograms, at least about 10 picograms, or from about 8 to about 9 picograms, or from about 9 to about 10 picograms) fetal hemoglobin per cell.

37. A cell, altered by the method of any of claims 29-36, or a cell obtainable by the method of any of claims 29-36.

38. A cell, comprising a first gRNA molecule of any of claims 1-20, or a composition of any of claims 21-26, a nucleic acid of claim 27, or a vector of claim 28.

39. The cell of any of claims 37-38, wherein the cell is capable of differentiating into a differentiated cell, e.g., a cell of an erythroid lineage (e.g., a red blood cell), and wherein said differentiated cell exhibits an increased level of fetal hemoglobin, e.g., relative to a cell of the same type that has not been modified to comprise a gRNA molecule, optionally wherein the differentiated cell (e.g., cell of an erythroid lineage, e.g., red blood cell) produces at least about 6 picograms (e.g., at least about 7 picograms, at least about 8 picograms, at least about 9 picograms, at least about 10 picograms, or from about 8 to about 9 picograms, or from about 9 to about 10 picograms) fetal hemoglobin, e.g., relative to a differentiated cell of the same type that has not been modified to comprise a gRNA molecule.

40. The cell of any of claims 37-39, that has been contacted with a stem cell expander.

41. The cell of claim 40, wherein the stem cell expander is:
a) (1r,4r)-N¹-(2-benzyl-7-(2-methyl-2H-tetrazol-5-yl)-9H-pyrimido[4,5-b]indol-4-yl)cyclohexane-1,4-diamine;
b) methyl 4-(3-piperidin-1-ylpropylamino)-9H-pyrimido[4,5-b]indole-7-carboxylate;
c) 4-(2-(2-(benzo[b]thiophen-3-yl)-9-isopropyl-9H-purin-6-ylamino)ethyl)phenol;
d) (S)-2-(6-(2-(1H-indol-3-yl)ethylamino)-2-(5-fluoropyridin-3-yl)-9H-purin-9-yl)propan-1-ol; or
e) combinations thereof (e.g., a combination of (1r,4r)-N¹-(2-benzyl-7-(2-methyl-2H-tetrazol-5-yl)-9H-pyrimido[4,5-b]indol-4-yl)cyclohexane-1,4-diamine and (S)-2-(6-(2-(1H-indol-3-yl)ethylamino)-2-(5-fluoropyridin-3-yl)-9H-purin-9-yl)propan-l-ol).

42. A cell, e.g., a cell of any of claims 37-41, comprising:
a) an indel at or near a genomic DNA sequence complementary to the targeting domain of a gRNA molecule of any of claims 1-20; and/or
b) a deletion comprising sequence, e.g., substantially all the sequence, between a sequence complementary to the targeting domain of a gRNA molecule of any of claims 1-20 (e.g., at least 90% complementary to the gRNA targeting domain, e.g., fully complementary to the gRNA targeting domain) in the WIZ gene.

43. The cell of any of claims 37-42, wherein the cell is an animal cell, e.g., a mammalian, primate, or human cell, e.g., is a human cell; optionally wherein said cell is obtained from a patient suffering from a hemoglobinopathy, e.g., sickle cell disease or a thalassemia, e.g., beta-thalassemia.

44. The cell of any of claims 37-43, wherein the cell is an HSPC, optionally a CD34+ HSPC, optionally a CD34+CD90+ HSPC.

45. The cell of any of claims 37-44, wherein the cell (e g population of cells) has been isolated from bone marrow, peripheral blood (e.g., mobilized peripheral blood), or umbilical cord blood.

46. The cell of any of claims 37-45, wherein the cell is autologous or allogeneic with respect to a patient to be administered said cell.

47. A population of cells comprising the cell of any of claims 37-46, optionally wherein at least about 50%, e.g., at least about 60%, e.g., at least about 70%, e.g., at least about 80%, e.g., at least about 90% (e.g., at least about 95%, at least about 96%, at least about 97%, at least about 98%, or at least about 99%) of the cells of the population are a cell according to any of claims 37-46.

48. The population of cells of claim 47, wherein the population of cells is capable of differentiating into a population of differentiated cells, e.g., a population of cells of an erythroid lineage (e.g., a population of red blood cells), and wherein said population of differentiated cells has an increased percentage of F cells (e.g., at least about 15%, at least about 17%, at least about 20%, at least about 25%, at least about 30%, or at least about 40% higher percentage of F cells) e.g., relative to a population of unmodified cells of the same type; optionally wherein the F cells of the population of differentiated cells produce an average of at least about 6 picograms (e.g., at least about 7 picograms, at least about 8 picograms, at least about 9 picograms, at least about 10 picograms, or from about 8 to about 9 picograms, or from about 9 to about 10 picograms) fetal hemoglobin per cell.

49. The population of cells of any of claims 47-48, comprising:
1) at least 1e6 CD34+ cells/kg body weight of the patient to whom the cells are to be administered;
2) at least 2e6 CD34+ cells/kg body weight of the patient to whom the cells are to be administered;
3) at least 3e6 CD34+ cells/kg body weight of the patient to whom the cells are to be administered;
4) at least 4e6 CD34+ cells/kg body weight of the patient to whom the cells are to be administered; or
5) from 2e6 to 10e6 CD34+ cells/kg body weight of the patient to whom the cells are to be administered.

50. The population of cells of any of claims 47-49, wherein at least about 40%, e.g., at least about 50%, (e.g., at least about 60%, at least about 70%, at least about 80%, or at least about 90%) of the cells of the population are CD34+ cells, optionally wherein at least about 10%, e.g., at least about 15%, e.g., at least about 20%, e.g., at least about 30% of the cells of the population are CD34+CD90+ cells.

51. The population of cells of any of claims 47-50, wherein the population of cells is derived from umbilical cord blood, peripheral blood (e.g., mobilized peripheral blood), or bone marrow, e.g., is derived from bone marrow.

52. The population of cells of any of claims 47-51, wherein the population of cells comprises, e.g., consists of, mammalian cells, e.g., human cells, optionally wherein the population of cells is obtained from a patient suffering from a hemoglobinopathy, e.g., sickle cell disease or a thalassemia, e.g., beta-thalassemia.

53. The population of cells of any of claims 47-52, wherein the population of cells is (i) autologous relative to a patient to which it is to be administered, or (ii) allogeneic relative to a patient to which it is to be administered.

54. A composition comprising the cell or the population of cells of any of claims 37-53, optionally comprising a pharmaceutically acceptable medium, e.g., a pharmaceutically acceptable medium suitable for cryopreservation.

55. A method of treating a hemoglobinopathy, comprising administering to a patient a cell or population of cells of any of claims 37-53 or a composition of claim 54 or a composition that reduces WIZ gene expression and/or WIZ protein activiy.

56. A method of increasing fetal hemoglobin expression in a mammal, comprising administering to a patient a cell or population of cells of any of claims 37-53, or a composition of claim 54 or a composition that reduces WIZ gene expression and/or WIZ protein activiy.

57. The method of claim 55, wherein the hemoglobinopathy is beta-thalassemia or sickle cell disease.

58. The method of claim 55 or 56, wherein the composition that reduces WIZ gene expression and/or WIZ protein activiy comprises a small molecule compound, siRNA, shRNA, antisense oligonucleotide (ASO), miRNA, anti-microRNA oligonucleotide (AMO) or any combination thereof.

59. A method of preparing a cell (e.g., a population of cells) comprising:
(a) providing a cell (e.g., a population of cells) (e.g., a HSPC (e.g., a population of HSPCs));
(b) culturing said cell (e.g., said population of cells) ex vivo in a cell culture medium comprising a stem cell expander; and
(c) introducing into said cell a first gRNA molecule of any of claims 1-20, a nucleic acid molecule encoding a first gRNA molecule of any of claims 1-20, a composition of any of claims 21-26, a nucleic acid of claim 27, or a vector of claim 28.

60. The method of claim 59, wherein after said introducing of step (c), said cell (e.g., population of cells) is capable of differentiating into a differentiated cell (e.g., population of differentiated cells), e.g., a cell of an erythroid lineage (e.g., population of cells of an erythroid lineage), e.g., a red blood cell (e.g., a population of red blood cells), and wherein said differentiated cell (e.g., population of differentiated cells) produces increased fetal hemoglobin, e.g., relative to the same cell which has not been subjected to step (c).

61. The method of any of claims 59-60, wherein the stem cell expander is:
a) (1r,4r)-N1-(2-benzyl-7-(2-methyl-2H-tetrazol-5-yl)-9H-pyrimido[4,5-b]indol-4-yl)cyclohexane-1,4-diamine;
b) methyl 4-(3-piperidin-1-ylpropylamino)-9H-pyrimido[4,5-b]indole-7-carboxylate;
c) 4-(2-(2-(benzo[b]thiophen-3-yl)-9-isopropyl-9H-purin-6-ylamino)ethyl)phenol;
d) (S)-2-(6-(2-(1H-indol-3-yl)ethylamino)-2-(5-fluoropyridin-3-yl)-9H-purin-9-yl)propan-1-ol; or
e) combinations thereof (e.g., a combination of (1r,4r)-Nl-(2-benzyl-7-(2-methyl-2H-tetrazol-5-yl)-9H-pyrimido[4,5-b]indol-4-yl)cyclohexane-1,4-diamine and (S)-2-(6-(2-(1H-indol-3-yl)ethylamino)-2-(5-fluoropyridin-3-yl)-9H-purin-9-yl)propan-l-ol).

62. The method of any of claims 59-61, wherein the cell culture medium comprises thrombopoietin (Tpo), Flt3 ligand (Flt-3L), and human stem cell factor (SCF), optionally wherein the cell culture medium further comprises human interleukin-6 (IL-6); optionally wherein the cell culture medium comprises thrombopoietin (Tpo), Flt3 ligand (Flt-3L), human stem cell factor (SCF), and if present, human IL-6, each at a concentration ranging from about 10 ng/mL to about 1000 ng/mL, optionally each at a concentration of about 50 ng/mL, e.g, at a concentration of 50 ng/mL.

63. The method of any of claims 59-62, wherein the cell culture medium comprises a stem cell expander at a concentration ranging from about 1 nM to about 1 mM, optionally at a concentration ranging from about 1 uM to about 100 nM, optionally at a concentration ranging from about 500 nM to about 750 nM, optionally at a concentration of about 500 nM, e.g., at a concentration of 500 nM, or at a concentration of about 750 nM, e.g., at a concentration of 750 nM.

64. The method of any of claims 59-63, wherein the culturing of step (b) comprises a period of culturing before the introducing of step (c), optionally wherein the period of culturing before the introducing of step (c) is at least 12 hours, e.g., is for a period of about 1 day to about 12 days, e.g., is for a period of about 1 day to about 6 days, e.g., is for a period of about 1 day to about 3 days, e.g., is for a period of about 1 day to about 2 days, e.g., is for a period of about 2 days.

65. The method of any of claims 59-64, wherein the culturing of step (b) comprises a period of culturing after the introducing of step (c), optionally wherein the period of culturing after the introducing of step (c) is at least 12 hours, e.g., is for a period of about 1 day to about 12 days, e.g., is for a period of about 1 day to about 6 days, e.g., is for a period of about 2 days to about 4 days, e.g., is for a period of about 2 days or is for a period of about 3 days or is for a period of about 4 days.

66. The method of any of claims 59-65, wherein the population of cells is expanded ex vivo at least 3-fold, e.g., at least 4-fold, e.g., at least 5-fold, e.g., at least 10-fold.

67. The method of any of claims 59-66, wherein the introducing of step (c) comprises an electroporation.

68. The method of any of claims 59-67, wherein the cell (e.g., population of cells) provided in step (a) is a human cell (e.g., a population of human cells).

69. The method of claim 68, wherein the cell (e.g., population of cells) provided in step (a) is isolated from bone marrow, peripheral blood (e.g., mobilized peripheral blood) or umbilical cord blood.

70. The method of claim 69, wherein
(i) the cell (e.g., population of cells) provided in step (a) is isolated from bone marrow, e.g., is isolated from bone marrow of a patient suffering from a hemoglobinopathy, optionally wherein the hemoglobinopathy is sickle cell disease or a thalassemia, optionally wherein the thalassemia is beta thalassemia; or
(ii) the cell (e.g., population of cells) provided in step (a) is isolated from peripheral blood, e.g., is isolated from peripheral blood of a patient suffering from a hemoglobinopathy, optionally wherein the hemoglobinopathy is sickle cell disease or a thalassemia, optionally wherein the thalassemia is beta thalassemia; optionally wherein the peripheral blood is mobilized peripheral blood, optionally wherein the mobilized peripheral blood is mobilized using Plerixafor, G-CSF, or a combination thereof.

71. The method of any of claims 59-70, wherein the population of cells provided in step (a) is enriched for CD34+ cells.

72. The method of any of claims 59-71, wherein subsequent to the introducing of step (c), the cell (e.g., population of cells) is cryopreserved.

73. The method of any of claims 59-72, wherein subsequent to the introducing of step (c), the cell (e.g., population of cells) comprises:
a) an indel at or near a genomic DNA sequence complementary to the targeting domain of the first gRNA molecule; and/or
b) a deletion comprising sequence, e.g., substantially all the sequence, between a sequence complementary to the targeting domain of the first gRNA molecule (e.g., at least 90% complementary to the gRNA targeting domain, e.g., fully complementary to the gRNA targeting domain) in the WIZ gene.

74. The method of any of claims 59-73, wherein:
(a) after the introducing of step (c), at least about 40%, at least about 50%, at least about 60%, at least about 70%, at least about 80%, at least about 90%, at least about 95%, at least about 96%, at least about 97%, at least about 98% or at least about 99% of the cells of the population of cells comprise an indel at or near a genomic DNA sequence complementary to the targeting domain of the first gRNA molecule;
(b) after the introducing of step (c), the cell (e.g., population of cells) is capable of differentiating into a differentiated cell of an erythroid lineage (e.g., a red blood cell), and wherein said differentiated cell exhibits an increased level of fetal hemoglobin, e.g., relative to an unaltered cell (e.g., population of cells);
(c) after the introducing of step (c), the population of cells is capable of differentiating into a population of differentiated cells, e.g., a population of cells of an erythroid lineage (e.g., a population of red blood cells), and wherein said population of differentiated cells has an increased percentage of F cells (e.g., at least about 15%, at least about 20%, at least about 25%, at least about 30%, or at least about 40% higher percentage of F cells) e.g., relative to a population of unaltered cells;
(d) after the introducing of step (c), the cell (e.g., population of cells) is capable of differentiating into a differentiated cell, e.g., a cell of an erythroid lineage (e.g., a red blood cell), and wherein said differentiated cell (e.g., population of differentiated cells) produces at least about 6 picograms (e.g., at least about 7 picograms, at least about 8 picograms, at least about 9 picograms, at least about 10 picograms, or from about 8 to about 9 picograms, or from about 9 to about 10 picograms) fetal hemoglobin per cell;
(e) after the introducing of step (c) no off-target indels are formed in said cell, e.g., no off-target indels are formed outside of the WIZ gene, e.g., as detectible by next generation sequencing and/or a nucleotide insertional assay; and/or
(f) after the introducing of step (c), no off-target indel, e.g., no off-target indel outside of the WIZ gene, is detected in more than about 5%, e.g., more than about 1%, e.g., more than about 0.1%, e.g., more than about 0.01%, of the cells of the population of cells, e.g., as detectible by next generation sequencing and/or a nucleotide insertional assay.

75. A cell (e.g., population of cells), obtainable by the method of any of claims 59-74.

76. A cell, e.g., an altered cell, e.g., a cell of claim 75, wherein:
(a) at least about 40%, at least about 50%, at least about 60%, at least about 70%, at least about 80%, at least about 90%, at least about 95%, at least about 96%, at least about 97%, at least about 98% or at least about 99% of the cells of the population of cells comprise an indel at or near a genomic DNA sequence complementary to the targeting domain of a gRNA molecule of any of claims 1-20;
(b) the cell (e.g., population of cells) is capable of differentiating into a differentiated cell of an erythroid lineage (e.g., a red blood cell), and wherein said differentiated cell exhibits an increased level of fetal hemoglobin, e.g., relative to an unaltered cell (e.g., population of cells);
(c) the population of cells is capable of differentiating into a population of differentiated cells, e.g., a population of cells of an erythroid lineage (e.g., a population of red blood cells), and wherein said population of differentiated cells has an increased percentage of F cells (e.g., at least about 15%, at least about 20%, at least about 25%, at least about 30%, or at least about 40% higher percentage of F cells) e.g., relative to a population of unaltered cells;
(d) the cell (e.g., population of cells) is capable of differentiating into a differentiated cell, e.g., a cell of an erythroid lineage (e.g., a red blood cell), and wherein said differentiated cell (e.g., population of differentiated cells) produces at least about 6 picograms (e.g., at least about 7 picograms, at least about 8 picograms, at least about 9 picograms, at least about 10 picograms, or from about 8 to about 9 picograms, or from about 9 to about 10 picograms) fetal hemoglobin per cell;
(e) no off-target indels are formed in said cell, e.g., no off-target indels are formed outside of the WIZ gene, e.g., as detectible by next generation sequencing and/or a nucleotide insertional assay;
(f) no off-target indel, e.g., no off-target indel outside of the WIZ gene, is detected in more than about 5%, e.g., more than about 1%, e.g., more than about 0.1%, e.g., more than about 0.01%, of the cells of the population of cells, e.g., as detectible by next generation sequencing and/or a nucleotide insertional assay; and/or
(g) said cell or its progeny is detectible in a patient to which it is transplanted at more than 16 weeks, more than 20 weeks or more than 24 weeks after transplantation, optionally as detected by detecting an indel at or near a genomic DNA sequence complementary to the targeting domain of a gRNA molecule of any of claims 1-20.

77. The cell of any of claims 75-76, wherein the cell is an animal cell, e.g., a mammalian, primate, or human cell, e.g., is a human cell; optionally wherein said cell is obtained from a patient suffering from a hemoglobinopathy, e.g., sickle cell disease or a thalassemia, e.g., beta-thalassemia.

78. The cell of any of claims 75-77, wherein the cell is an HSPC, optionally a CD34+ HSPC, optionally a CD34+CD90+ HSPC.

79. The cell of any of claims 75-78, wherein the cell (e g population of cells) has been isolated from bone marrow, peripheral blood (e.g., mobilized peripheral blood), or umbilical cord blood.

80. The cell of any of claims 75-79, wherein the cell is autologous or allogeneic with respect to a patient to be administered said cell.

81. A method of treating a hemoglobinopathy, comprising administering to a human patient a composition comprising a cell or population of cells of any of claims 37-53 or 74-79 or a comosition that reduces WIZ gene expression and/or WIZ protein acitivity.

82. A method of increasing fetal hemoglobin expression in a human patient, comprising administering to said human patient a composition comprising a cell or population of cells of any of claims 37-53 or 74-79 or a comosition that reduces WIZ gene expression and/or WIZ protein acitivity.

83. The method of claim 81, wherein the hemoglobinopathy is beta-thalassemia or sickle cell disease.

84. The method of any of claims 81-83, wherein the human patient is administered a composition comprising at least about 1e6 cells of any of claim 37-53 or 74-79 per kg body weight of the human patient, e.g., at least about 1e6 CD34+ cells of any of claim 37-53 or 74-79 per kg body weight of the human patient.

85. The method of any of claims 81-84, wherein the cell or population of cells, or its progeny, is detectible in the human patient at more than 16 weeks, more than 20 weeks or more than 24 weeks after administration, optionally as detected by detecting an indel at or near a genomic DNA sequence complementary to the targeting domain of a gRNA molecule of any of claims 1-20, optionally wherein the level of detection of the indel in a reference cell population (e.g., CD34+ cells) at the more than 16 weeks, more than 20 weeks or more than 24 weeks after administration is reduced by no more than 50%, no more than 40%, no more than 30%, no more than 20%, no more than 10%, no more than 5% or no more than 1%, relative to the level of detection of the indel in the population of cells just prior to administration.

86. The method of claim 81 or claim 82, wherein the composition that reduces WIZ gene expression and/or WIZ protein activiy comprises a small molecule compound, siRNA, shRNA, ASO, miRNA, AMO, or any combination thereof.

87. A gRNA molecule of any of claims 1-20, a composition of any of claims 21-26 or 54, a nucleic acid of claim 27, a vector of claim 28, a cell or population of cells of any of claims 37-53 or 75-80, or a composition that reduces WIZ gene expression and/or WIZ protein activiy for use as a medicament.

88. A gRNA molecule of any of claims 1-20, a composition of any of claims 21-26 or 54, a nucleic acid of claim 27, a vector of claim 28, a cell or population of cells of any of claims 37-53 or 75-80, or a composition that reduces WIZ gene expression and/or WIZ protein activiy for use in the manufacture of a medicament.

89. A gRNA molecule of any of claims 1-20, a composition of any of claims 21-26 or 54, a nucleic acid of claim 27, a vector of claim 28, a cell or population of cells of any of claims 37-53 or 75-80, or a composition that reduces WIZ gene expression and/or WIZ protein activiy for use in the treatment of a disease.

90. A gRNA molecule of any of claims 1-20, a composition of any of claims 21-26 or 54, a nucleic acid of claim 27, a vector of claim 28, a cell or population of cells of any of claims 37-53 or 75-80, or a composition that reduces WIZ gene expression and/or WIZ protein activiy for use in the treatment of a disease, wherein the disease is a hemoglobinopathy, optionally wherein the hemoglobinopathy is sickle cell disease or a thalassemia (e.g., beta-thalassemia).

91. The gRNA molecule, the composition, the nucleic acid, the vector, the cell or population of cells, or the composition that reduces WIZ gene expression and/or WIZ protein activiy of claims 87-90, wherein the composition that reduces WIZ gene expression and/or WIZ protein activiy comprises a small molecule compound, siRNA, shRNA, ASO, miRNA, AMO, or any combination thereof.

The application's sequence listing, which the Patent Office published only in electronic form, follows.

SEQUENCE LISTING (3208 sequences)

SEQ ID NO: 1 - RNA, 20 nt, Artificial Sequence
  source: /note="Description of Artificial Sequence: Synthetic oligonucleotide"
aagaauuggcaauucuuagu

SEQ ID NO: 2 - RNA, 20 nt, Artificial Sequence
  source: /note="Description of Artificial Sequence: Synthetic oligonucleotide"
uaagaauuggcaauucuuag

SEQ ID NO: 3 - RNA, 20 nt, Artificial Sequence
  source: /note="Description of Artificial Sequence: Synthetic oligonucleotide"
agagaugaauagggcuugcg

SEQ ID NO: 4 - RNA, 20 nt, Artificial Sequence
  source: /note="Description of Artificial Sequence: Synthetic oligonucleotide"
gagagaugaauagggcuugc

SEQ ID NO: 5 - RNA, 20 nt, Artificial Sequence
  source: /note="Description of Artificial Sequence: Synthetic oligonucleotide"
uucuaauuaggggagaauuu

SEQ ID NO: 6 - RNA, 20 nt, Artificial Sequence
  source: /note="Description of Artificial Sequence: Synthetic oligonucleotide"
uccaugagacuucuaauuag

SEQ ID NO: 7 - RNA, 20 nt, Artificial Sequence
  source: /note="Description of Artificial Sequence: Synthetic oligonucleotide"
cuccaugagacuucuaauua

SEQ ID NO: 8 - RNA, 20 nt, Artificial Sequence
  source: /note="Description of Artificial Sequence: Synthetic oligonucleotide"
ucuccaugagacuucuaauu

SEQ ID NO: 9 - RNA, 20 nt, Artificial Sequence
  source: /note="Description of Artificial Sequence: Synthetic oligonucleotide"
cuggugagaacuuguguaca

SEQ ID NO: 10 - RNA, 20 nt, Artificial Sequence
  source: /note="Description of Artificial Sequence: Synthetic oligonucleotide"
auggguccucucacugugua

SEQ ID NO: 11 - RNA, 20 nt, Artificial Sequence
  source: /note="Description of Artificial Sequence: Synthetic oligonucleotide"
uauggguccucucacugugu

SEQ ID NO: 12 - RNA, 20 nt, Artificial Sequence
  source: /note="Description of Artificial Sequence: Synthetic oligonucleotide"
uaucgaaugccuuuaacuau

SEQ ID NO: 13 - RNA, 20 nt, Artificial Sequence
  source: /note="Description of Artificial Sequence: Synthetic oligonucleotide"
uuaucgaaugccuuuaacua

SEQ ID NO: 14 - RNA, 20 nt, Artificial Sequence
  source: /note="Description of Artificial Sequence: Synthetic oligonucleotide"
gugagaggacccauaguuaa

SEQ ID NO: 15 - RNA, 20 nt, Artificial Sequence
  source: /note="Description of Artificial Sequence: Synthetic oligonucleotide"
aagguauucaccauuguuau

SEQ ID NO: 16 - RNA, 20 nt, Artificial Sequence
  source: /note="Description of Artificial Sequence: Synthetic oligonucleotide"
gauugggagguugccagggg

SEQ ID NO: 17 - RNA, 20 nt, Artificial Sequence
  source: /note="Description of Artificial Sequence: Synthetic oligonucleotide"
ugugggauugggagguugcc

SEQ ID NO: 18 - RNA, 20 nt, Artificial Sequence
  source: /note="Description of Artificial Sequence: Synthetic oligonucleotide"
agaugcucucacugugggau

SEQ ID NO: 19 - RNA, 20 nt, Artificial Sequence
  source: /note="Description of Artificial Sequence: Synthetic oligonucleotide"
cuaggaagaugcucucacug

SEQ ID NO: 20 - RNA, 20 nt, Artificial Sequence
  source: /note="Description of Artificial Sequence: Synthetic oligonucleotide"
ccuaggcccuccucauguca

SEQ ID NO: 21 - RNA, 20 nt, Artificial Sequence
  source: /note="Description of Artificial Sequence: Synthetic oligonucleotide"
aggcccuccucaugucacgg

SEQ ID NO: 22 - RNA, 20 nt, Artificial Sequence
  source: /note="Description of Artificial Sequence: Synthetic oligonucleotide"
uccucaugucacggaggcca

SEQ ID NO: 23 - RNA, 20 nt, Artificial Sequence
  source: /note="Description of Artificial Sequence: Synthetic oligonucleotide"
ccucaugucacggaggccau

SEQ ID NO: 24 - RNA, 20 nt, Artificial Sequence
  source: /note="Description of Artificial Sequence: Synthetic oligonucleotide"
caaaucaugggugaguggau

SEQ ID NO: 25 - RNA, 20 nt, Artificial Sequence
  source: /note="Description of Artificial Sequence: Synthetic oligonucleotide"
acggauagguuagcauuugc

SEQ ID NO: 26 - RNA, 20 nt, Artificial Sequence
  source: /note="Description of Artificial Sequence: Synthetic oligonucleotide"
ugaccugguaggugaguagc

SEQ ID NO: 27 - RNA, 20 nt, Artificial Sequence
  source: /note="Description of Artificial Sequence: Synthetic oligonucleotide"
ggguaguugguuaaccaggu

SEQ ID NO: 28 - RNA, 20 nt, Artificial Sequence
  source: /note="Description of Artificial Sequence: Synthetic oligonucleotide"
gguaguugguuaaccagguu

SEQ ID NO: 29 - RNA, 20 nt, Artificial Sequence
  source: /note="Description of Artificial Sequence: Synthetic oligonucleotide"
cuaggcagacauacccaacc

SEQ ID NO: 30 - RNA, 20 nt, Artificial Sequence
  source: /note="Description of Artificial Sequence: Synthetic oligonucleotide"
augucugccuagaaaaggcc

SEQ ID NO: 31 - RNA, 20 nt, Artificial Sequence
  source: /note="Description of Artificial Sequence: Synthetic oligonucleotide"
gcccaguucucaggcgucuc

SEQ ID NO: 32 - RNA, 20 nt, Artificial Sequence
  source: /note="Description of Artificial Sequence: Synthetic oligonucleotide"
caccaguuugucuguugauu

SEQ ID NO: 33 - RNA, 20 nt, Artificial Sequence
  source: /note="Description of Artificial Sequence: Synthetic oligonucleotide"
cugggcggaaagaugugugu

SEQ ID NO: 34 - RNA, 20 nt, Artificial Sequence
  source: /note="Description of Artificial Sequence: Synthetic oligonucleotide"
uuacuugggugcuggaugaa

SEQ ID NO: 35 - RNA, 20 nt, Artificial Sequence
  source: /note="Description of Artificial Sequence: Synthetic oligonucleotide"
agugaauggguggguugagu

SEQ ID NO: 36 - RNA, 20 nt, Artificial Sequence
  source: /note="Description of Artificial Sequence: Synthetic oligonucleotide"
uagcuaggugguuagauauc

SEQ ID NO: 37 - RNA, 20 nt, Artificial Sequence
  source: /note="Description of Artificial Sequence: Synthetic oligonucleotide"
ugguuagauaucuggauaca

SEQ ID NO: 38 - RNA, 20 nt, Artificial Sequence
  source: /note="Description of Artificial Sequence: Synthetic oligonucleotide"
uuagauaucuggauacaugg

SEQ ID NO: 39 - RNA, 20 nt, Artificial Sequence
  source: /note="Description of Artificial Sequence: Synthetic oligonucleotide"
gguggauaagacaagacaac

SEQ ID NO: 40 - RNA, 20 nt, Artificial Sequence
  source: /note="Description of Artificial Sequence: Synthetic oligonucleotide"
ggccaugaugugugucugau

SEQ ID NO: 41 - RNA, 20 nt, Artificial Sequence
  source: /note="Description of Artificial Sequence: Synthetic oligonucleotide"
gccaugaugugugucugaug

SEQ ID NO: 42 - RNA, 20 nt, Artificial Sequence
  source: /note="Description of Artificial Sequence: Synthetic oligonucleotide"
guccuggaagcugugauccu

SEQ ID NO: 43 - RNA, 20 nt, Artificial Sequence
  source: /note="Description of Artificial Sequence: Synthetic oligonucleotide"
cuggguggagaaggugacuu

SEQ ID NO: 44 - RNA, 20 nt, Artificial Sequence
  source: /note="Description of Artificial Sequence: Synthetic oligonucleotide"
ugacuuaggacugaagaccu

SEQ ID NO: 45 - RNA, 20 nt, Artificial Sequence
  source: /note="Description of Artificial Sequence: Synthetic oligonucleotide"
caugucccuagaguugcccu

SEQ ID NO: 46 - RNA, 20 nt, Artificial Sequence
  source: /note="Description of Artificial Sequence: Synthetic oligonucleotide"
ugaagaccuagggcaacucu

SEQ ID NO: 47 - RNA, 20 nt, Artificial Sequence
  source: /note="Description of Artificial Sequence: Synthetic oligonucleotide"
gaagaccuagggcaacucua

SEQ ID NO: 48 - RNA, 20 nt, Artificial Sequence
  source: /note="Description of Artificial Sequence: Synthetic oligonucleotide"
cuagggcaacucuagggaca

SEQ ID NO: 49 - RNA, 20 nt, Artificial Sequence
  source: /note="Description of Artificial Sequence: Synthetic oligonucleotide"
gggcaacucuagggacaugg

SEQ ID NO: 50 - RNA, 20 nt, Artificial Sequence
  source: /note="Description of Artificial Sequence: Synthetic oligonucleotide"
ugaaguccaguguggaugau

SEQ ID NO: 51 - RNA, 20 nt, Artificial Sequence
  source: /note="Description of Artificial Sequence: Synthetic oligonucleotide"
gguuggaagguagcugaugg

SEQ ID NO: 52 - RNA, 20 nt, Artificial Sequence
  source: /note="Description of Artificial Sequence: Synthetic oligonucleotide"
aaggcuaaaaauuggcuggg

SEQ ID NO: 53 - RNA, 20 nt, Artificial Sequence
  source: /note="Description of Artificial Sequence: Synthetic oligonucleotide"
uucccccaugggucauugau

SEQ ID NO: 54 - RNA, 20 nt, Artificial Sequence
  source: /note="Description of Artificial Sequence: Synthetic oligonucleotide"
guucccccaugggucauuga

SEQ ID NO: 55 - RNA, 20 nt, Artificial Sequence
  source: /note="Description of Artificial Sequence: Synthetic oligonucleotide"
gugcagagaaguucccccau

SEQ ID NO: 56 - RNA, 20 nt, Artificial Sequence
  source: /note="Description of Artificial Sequence: Synthetic oligonucleotide"
aagcacuaaaagagugggga

SEQ ID NO: 57 - RNA, 20 nt, Artificial Sequence
  source: /note="Description of Artificial Sequence: Synthetic oligonucleotide"
gcuaaaagcacuaaaagagu

SEQ ID NO: 58 - RNA, 20 nt, Artificial Sequence
  source: /note="Description of Artificial Sequence: Synthetic oligonucleotide"
cgcuaaaagcacuaaaagag

SEQ ID NO: 59 - RNA, 20 nt, Artificial Sequence
  source: /note="Description of Artificial Sequence: Synthetic oligonucleotide"
gcuuuuagcgagccuaccau

SEQ ID NO: 60 - RNA, 20 nt, Artificial Sequence
  source: /note="Description of Artificial Sequence: Synthetic oligonucleotide"
ccacugguacuuccaauggu

SEQ ID NO: 61 - RNA, 20 nt, Artificial Sequence
  source: /note="Description of Artificial Sequence: Synthetic oligonucleotide"
cgucccacugguacuuccaa

SEQ ID NO: 62 - RNA, 20 nt, Artificial Sequence
  source: /note="Description of Artificial Sequence: Synthetic oligonucleotide"
ccuaccauuggaaguaccag

SEQ ID NO: 63 - RNA, 20 nt, Artificial Sequence
  source: /note="Description of Artificial Sequence: Synthetic oligonucleotide"
cuaccauuggaaguaccagu

SEQ ID NO: 64 - RNA, 20 nt, Artificial Sequence
  source: /note="Description of Artificial Sequence: Synthetic oligonucleotide"
auggcuccuuaucgucccac

SEQ ID NO: 65 - RNA, 20 nt, Artificial Sequence
  source: /note="Description of Artificial Sequence: Synthetic oligonucleotide"
gaaguaccagugggacgaua

SEQ ID NO: 66 - RNA, 20 nt, Artificial Sequence
  source: /note="Description of Artificial Sequence: Synthetic oligonucleotide"
ugggacgauaaggagccauu

SEQ ID NO: 67 - RNA, 20 nt, Artificial Sequence
  source: /note="Description of Artificial Sequence: Synthetic oligonucleotide"
gggacgauaaggagccauug

SEQ ID NO: 68 - RNA, 20 nt, Artificial Sequence
  source: /note="Description of Artificial Sequence: Synthetic oligonucleotide"
cuugucgucccacaccccaa

SEQ ID NO: 69 - RNA, 20 nt, Artificial Sequence
  source: /note="Description of Artificial Sequence: Synthetic oligonucleotide"
cauuggggugugggacgaca

SEQ ID NO: 70 - RNA, 20 nt, Artificial Sequence
  source: /note="Description of Artificial Sequence: Synthetic oligonucleotide"
auuggggugugggacgacaa

SEQ ID NO: 71 - RNA, 20 nt, Artificial Sequence
  source: /note="Description of Artificial Sequence: Synthetic oligonucleotide"
ggacgacaaggguguuguca

SEQ ID NO: 72 - RNA, 20 nt, Artificial Sequence
  source: /note="Description of Artificial Sequence: Synthetic oligonucleotide"
aggguguugucaugguaacg

SEQ ID NO: 73 - RNA, 20 nt, Artificial Sequence
  source: /note="Description of Artificial Sequence: Synthetic oligonucleotide"
augguaacggggccucuccc

SEQ ID NO: 74 - RNA, 20 nt, Artificial Sequence
  source: /note="Description of Artificial Sequence: Synthetic oligonucleotide"
cacggccugaguccagggag

SEQ ID NO: 75 - RNA, 20 nt, Artificial Sequence
  source: /note="Description of Artificial Sequence: Synthetic oligonucleotide"
cucccuggacucaggccgug

SEQ ID NO: 76 - RNA, 20 nt, Artificial Sequence
  source: /note="Description of Artificial Sequence: Synthetic oligonucleotide"
ucacccuuaaagggcccgca

SEQ ID NO: 77 - RNA, 20 nt, Artificial Sequence
  source: /note="Description of Artificial Sequence: Synthetic oligonucleotide"
ccauguugggaguggccaag

SEQ ID NO: 78 - RNA, 20 nt, Artificial Sequence
  source: /note="Description of Artificial Sequence: Synthetic oligonucleotide"
agcgggcgcgccgccauguu

SEQ ID NO: 79 - RNA, 20 nt, Artificial Sequence
  source: /note="Description of Artificial Sequence: Synthetic oligonucleotide"
cagcgggcgcgccgccaugu

SEQ ID NO: 80 - RNA, 20 nt, Artificial Sequence
  source: /note="Description of Artificial Sequence: Synthetic oligonucleotide"
cuuggccacucccaacaugg

SEQ ID NO: 81 - RNA, 20 nt, Artificial Sequence
  source: /note="Description of Artificial Sequence: Synthetic oligonucleotide"
caacauggcggcgcgcccgc

SEQ ID NO: 82 - RNA, 20 nt, Artificial Sequence
  source: /note="Description of Artificial Sequence: Synthetic oligonucleotide"
cgccaugauggggagguccg

SEQ ID NO: 83 - RNA, 20 nt, Artificial Sequence
  source: /note="Description of Artificial Sequence: Synthetic oligonucleotide"
ccgccaugauggggaggucc

SEQ ID NO: 84 - RNA, 20 nt, Artificial Sequence
  source: /note="Description of Artificial Sequence: Synthetic oligonucleotide"
gccgccaugauggggagguc

SEQ ID NO: 85 - RNA, 20 nt, Artificial Sequence
  source: /note="Description of Artificial Sequence: Synthetic oligonucleotide"
cgccccggaccuccccauca

SEQ ID NO: 86 - RNA, 20 nt, Artificial Sequence
  source: /note="Description of Artificial Sequence: Synthetic oligonucleotide"
cccgccgcgccgccaugaug

SEQ ID NO: 87 - RNA, 20 nt, Artificial Sequence
  source: /note="Description of Artificial Sequence: Synthetic oligonucleotide"
cccggaccuccccaucaugg

SEQ ID NO: 88 - RNA, 20 nt, Artificial Sequence
  source: /note="Description of Artificial Sequence: Synthetic oligonucleotide"
uccccaucauggcggcgcgg

SEQ ID NO: 89 - RNA, 20 nt, Artificial Sequence
  source: /note="Description of Artificial Sequence: Synthetic oligonucleotide"
ccccaucauggcggcgcggc

SEQ ID NO: 90 - RNA, 20 nt, Artificial Sequence
  source: /note="Description of Artificial Sequence: Synthetic oligonucleotide"
gggcugucgcgcugagguca

SEQ ID NO: 91 - RNA, 20 nt, Artificial Sequence
  source: /note="Description of Artificial Sequence: Synthetic oligonucleotide"
cugucgcgcugaggucacgg

SEQ ID NO: 92 - RNA, 20 nt, Artificial Sequence
  source: /note="Description of Artificial Sequence: Synthetic oligonucleotide"
ugaggucacggcggcgcgcc

SEQ ID NO: 93 - RNA, 20 nt, Artificial Sequence
  source: /note="Description of Artificial Sequence: Synthetic oligonucleotide"
gaggucacggcggcgcgccg

SEQ ID NO: 94 - RNA, 20 nt, Artificial Sequence
  source: /note="Description of Artificial Sequence: Synthetic oligonucleotide"
aggucacggcggcgcgccgg

SEQ ID NO: 95 - RNA, 20 nt, Artificial Sequence
  source: /note="Description of Artificial Sequence: Synthetic oligonucleotide"
ggucacggcggcgcgccggg

SEQ ID NO: 96 - RNA, 20 nt, Artificial Sequence
  source: /note="Description of Artificial Sequence: Synthetic oligonucleotide"
gucacggcggcgcgccgggg

SEQ ID NO: 97 - RNA, 20 nt, Artificial Sequence
  source: /note="Description of Artificial Sequence: Synthetic oligonucleotide"
cggcggggggagcgauuuaa

SEQ ID NO: 98 - RNA, 20 nt, Artificial Sequence
  source: /note="Description of Artificial Sequence: Synthetic oligonucleotide"
ggcggggggagcgauuuaaa

SEQ ID NO: 99 - RNA, 20 nt, Artificial Sequence
  source: /note="Description of Artificial Sequence: Synthetic oligonucleotide"
cgcucccggugccggugccg

SEQ ID NO: 100 - RNA, 20 nt, Artificial Sequence
  source: /note="Description of Artificial Sequence: Synthetic oligonucleotide"
cggagcuccccuccuuggug

SEQ ID NO: 101 - RNA, 20 nt, Artificial Sequence
  source: /note="Description of Artificial Sequence: Synthetic oligonucleotide"
gccccacccgcgggcucccc

SEQ ID NO: 102 - RNA, 20 nt, Artificial Sequence
  source: /note="Description of Artificial Sequence: Synthetic oligonucleotide"
cuacggcuccgccccacccg

SEQ ID NO: 103 - RNA, 20 nt, Artificial Sequence
  source: /note="Description of Artificial Sequence: Synthetic oligonucleotide"
gggccucccccgccccgcua

SEQ ID NO: 104 - RNA, 20 nt, Artificial Sequence
  source: /note="Description of Artificial Sequence: Synthetic oligonucleotide"
ccggggggucccgccuggcc

SEQ ID NO: 105 - RNA, 20 nt, Artificial Sequence
  source: /note="Description of Artificial Sequence: Synthetic oligonucleotide"
cgggacgcgccgagguaggg

SEQ ID NO: 106 - RNA, 20 nt, Artificial Sequence
  source: /note="Description of Artificial Sequence: Synthetic oligonucleotide"
gcgggacgcgccgagguagg

SEQ ID NO: 107 - RNA, 20 nt, Artificial Sequence
  source: /note="Description of Artificial Sequence: Synthetic oligonucleotide"
cgcgggacgcgccgagguag

SEQ ID NO: 108 - RNA, 20 nt, Artificial Sequence
  source: /note="Description of Artificial Sequence: Synthetic oligonucleotide"
ccgcgggacgcgccgaggua

SEQ ID NO: 109 - RNA, 20 nt, Artificial Sequence
  source: /note="Description of Artificial Sequence: Synthetic oligonucleotide"
cccgcgggacgcgccgaggu

SEQ ID NO: 110 - RNA, 20 nt, Artificial Sequence
  source: /note="Description of Artificial Sequence: Synthetic oligonucleotide"
agaccccgcgggacgcgccg

SEQ ID NO: 111 - RNA, 20 nt, Artificial Sequence
  source: /note="Description of Artificial Sequence: Synthetic oligonucleotide"
cccuaccucggcgcgucccg

SEQ ID NO: 112 - RNA, 20 nt, Artificial Sequence
  source: /note="Description of Artificial Sequence: Synthetic oligonucleotide"
cuaccucggcgcgucccgcg

SEQ ID NO: 113 - RNA, 20 nt, Artificial Sequence
  source: /note="Description of Artificial Sequence: Synthetic oligonucleotide"
cccggggcaggagaccccgc

SEQ ID NO: 114 - RNA, 20 nt, Artificial Sequence
  source: /note="Description of Artificial Sequence: Synthetic oligonucleotide"
ucccgcggggucuccugccc

SEQ ID NO: 115 - RNA, 20 nt, Artificial Sequence
  source: /note="Description of Artificial Sequence: Synthetic oligonucleotide"
gcccuccgcccgugcacccc

SEQ ID NO: 116 - RNA, 20 nt, Artificial Sequence
  source: /note="Description of Artificial Sequence: Synthetic oligonucleotide"
agcccuccgcccgugcaccc

SEQ ID NO: 117 - RNA, 20 nt, Artificial Sequence
  source: /note="Description of Artificial Sequence: Synthetic oligonucleotide"
ccccggggugcacgggcgga

SEQ ID NO: 118 - RNA, 20 nt, Artificial Sequence
  source: /note="Description of Artificial Sequence: Synthetic oligonucleotide"
cucggggguccaggguccgg

SEQ ID NO: 119 - RNA, 20 nt, Artificial Sequence
  source: /note="Description of Artificial Sequence: Synthetic oligonucleotide"
ccucggggguccaggguccg

SEQ ID NO: 120 - RNA, 20 nt, Artificial Sequence
  source: /note="Description of Artificial Sequence: Synthetic oligonucleotide"
agggcucaucccccggaccc

SEQ ID NO: 121 - RNA, 20 nt, Artificial Sequence
  source: /note="Description of Artificial Sequence: Synthetic oligonucleotide"
gcccacuccucgggggucca

SEQ ID NO: 122 - RNA, 20 nt, Artificial Sequence
  source: /note="Description of Artificial Sequence: Synthetic oligonucleotide"
ggcccacuccucgggggucc

SEQ ID NO: 123 - RNA, 20 nt, Artificial Sequence
  source: /note="Description of Artificial Sequence: Synthetic oligonucleotide"
ccccggacccuggacccccg

SEQ ID NO: 124 - RNA, 20 nt, Artificial Sequence
  source: /note="Description of Artificial Sequence: Synthetic oligonucleotide"
cgcgcgggcccacuccucgg

SEQ ID NO: 125 - RNA, 20 nt, Artificial Sequence
  source: /note="Description of Artificial Sequence: Synthetic oligonucleotide"
ccgcgcgggcccacuccucg

SEQ ID NO: 126 - RNA, 20 nt, Artificial Sequence
  source: /note="Description of Artificial Sequence: Synthetic oligonucleotide"
acccuggacccccgaggagu

SEQ ID NO: 127 - RNA, 20 nt, Artificial Sequence
  source: /note="Description of Artificial Sequence: Synthetic oligonucleotide"
ccccgaggagugggcccgcg

SEQ ID NO: 128 - RNA, 20 nt, Artificial Sequence
  source: /note="Description of Artificial Sequence: Synthetic oligonucleotide"
aggugggggcugcgccgcgc

SEQ ID NO: 129 - RNA, 20 nt, Artificial Sequence
  source: /note="Description of Artificial Sequence: Synthetic oligonucleotide"
ccccaggggucgcagaggug

SEQ ID NO: 130 - RNA, 20 nt, Artificial Sequence
  source: /note="Description of Artificial Sequence: Synthetic oligonucleotide"
cccccaggggucgcagaggu

SEQ ID NO: 131 - RNA, 20 nt, Artificial Sequence
  source: /note="Description of Artificial Sequence: Synthetic oligonucleotide"
acgccccccaggggucgcag

SEQ ID NO: 132 - RNA, 20 nt, Artificial Sequence
  source: /note="Description of Artificial Sequence: Synthetic oligonucleotide"
ccccaccucugcgaccccug

SEQ ID NO: 133 - RNA, 20 nt, Artificial Sequence
  source: /note="Description of Artificial Sequence: Synthetic oligonucleotide"
ccaccucugcgaccccuggg

SEQ ID NO: 134 - RNA, 20 nt, Artificial Sequence
  source: /note="Description of Artificial Sequence: Synthetic oligonucleotide"
ccuacccggacgccccccag

SEQ ID NO: 135 - RNA, 20 nt, Artificial Sequence
  source: /note="Description of Artificial Sequence: Synthetic oligonucleotide"
cuccuacccggacgcccccc

SEQ ID NO: 136 - RNA, 20 nt, Artificial Sequence
  source: /note="Description of Artificial Sequence: Synthetic oligonucleotide"
ugcgaccccuggggggcguc

SEQ ID NO: 137 - RNA, 20 nt, Artificial Sequence
  source: /note="Description of Artificial Sequence: Synthetic oligonucleotide"
cggagcacuuuggcagcgug

SEQ ID NO: 138 - RNA, 20 nt, Artificial Sequence
  source: /note="Description of Artificial Sequence: Synthetic oligonucleotide"
ucggagcacuuuggcagcgu

SEQ ID NO: 139 - RNA, 20 nt, Artificial Sequence
  source: /note="Description of Artificial Sequence: Synthetic oligonucleotide"
uucggagcacuuuggcagcg

SEQ ID NO: 140 - RNA, 20 nt, Artificial Sequence
  source: /note="Description of Artificial Sequence: Synthetic oligonucleotide"
accgcaacuucggagcacuu

SEQ ID NO: 141 - RNA, 20 nt, Artificial Sequence
  source: /note="Description of Artificial Sequence: Synthetic oligonucleotide"
aacgggcgggaccgcaacuu

SEQ ID NO: 142 - RNA, 20 nt, Artificial Sequence
  source: /note="Description of Artificial Sequence: Synthetic oligonucleotide"
gccaaagugcuccgaaguug

SEQ ID NO: 143 - RNA, 20 nt, Artificial Sequence
  source: /note="Description of Artificial Sequence: Synthetic oligonucleotide"
acugcccgcggggaacgggc

SEQ ID NO: 144 - RNA, 20 nt, Artificial Sequence
  source: /note="Description of Artificial Sequence: Synthetic oligonucleotide"
cacugcccgcggggaacggg

SEQ ID NO: 145 - RNA, 20 nt, Artificial Sequence
  source: /note="Description of Artificial Sequence: Synthetic oligonucleotide"
gggcacugcccgcggggaac

SEQ ID NO: 146 - RNA, 20 nt, Artificial Sequence
  source: /note="Description of Artificial Sequence: Synthetic oligonucleotide"
ugggcacugcccgcggggaa

SEQ ID NO: 147 - RNA, 20 nt, Artificial Sequence
  source: /note="Description of Artificial Sequence: Synthetic oligonucleotide"
acugggugggcacugcccgc

SEQ ID NO: 148 - RNA, 20 nt, Artificial Sequence
  source: /note="Description of Artificial Sequence: Synthetic oligonucleotide"
ccugcgguuguccacugggu

SEQ ID NO: 149 - RNA, 20 nt, Artificial Sequence
  source: /note="Description of Artificial Sequence: Synthetic oligonucleotide"
accugcgguuguccacuggg

SEQ ID NO: 150 - RNA, 20 nt, Artificial Sequence
  source: /note="Description of Artificial Sequence: Synthetic oligonucleotide"
agcaccugcgguuguccacu

SEQ ID NO: 151 - RNA, 20 nt, Artificial Sequence
  source: /note="Description of Artificial Sequence: Synthetic oligonucleotide"
aagcaccugcgguuguccac

SEQ ID NO: 152 - RNA, 20 nt, Artificial Sequence
  source: /note="Description of Artificial Sequence: Synthetic oligonucleotide"
cccacccaguggacaaccgc

SEQ ID NO: 153 - RNA, 20 nt, Artificial Sequence
  source: /note="Description of Artificial Sequence: Synthetic oligonucleotide"
acaaccgcaggugcuuccuc

SEQ ID NO: 154 - RNA, 20 nt, Artificial Sequence
  source: /note="Description of Artificial Sequence: Synthetic oligonucleotide"
caaccgcaggugcuuccucc

SEQ ID NO: 155 - RNA, 20 nt, Artificial Sequence
  source: /note="Description of Artificial Sequence: Synthetic oligonucleotide"
gggucccuacccaggcccgg

SEQ ID NO: 156 - RNA, 20 nt, Artificial Sequence
  source: /note="Description of Artificial Sequence: Synthetic oligonucleotide"
ugggggucccuacccaggcc

SEQ ID NO: 157 - RNA, 20 nt, Artificial Sequence
  source: /note="Description of Artificial Sequence: Synthetic oligonucleotide"
cuuggugggggucccuaccc

SEQ ID NO: 158 - RNA, 20 nt, Artificial Sequence
  source: /note="Description of Artificial Sequence: Synthetic oligonucleotide"
gugggcuggcagucuuggug

SEQ ID NO: 159 - RNA, 20 nt, Artificial Sequence
  source: /note="Description of Artificial Sequence: Synthetic oligonucleotide"
cgugggcuggcagucuuggu

SEQ ID NO: 160 - RNA, 20 nt, Artificial Sequence
  source: /note="Description of Artificial Sequence: Synthetic oligonucleotide"
auucccagggggcuccuccg

SEQ ID NO: 161 - RNA, 20 nt, Artificial Sequence
  source: /note="Description of Artificial Sequence: Synthetic oligonucleotide"
cgggggccuggggauuccca

SEQ ID NO: 162 - RNA, 20 nt, Artificial Sequence
  source: /note="Description of Artificial Sequence: Synthetic oligonucleotide"
ucgggggccuggggauuccc

SEQ ID NO: 163 - RNA, 20 nt, Artificial Sequence
  source: /note="Description of Artificial Sequence: Synthetic oligonucleotide"
gggaauccccaggcccccga

SEQ ID NO: 164 - RNA, 20 nt, Artificial Sequence
  source: /note="Description of Artificial Sequence: Synthetic oligonucleotide"
guugcaggcgcugcccucgg

SEQ ID NO: 165 - RNA, 20 nt, Artificial Sequence
  source: /note="Description of Artificial Sequence: Synthetic oligonucleotide"
cgagggcagcgccugcaacc

SEQ ID NO: 166 - RNA, 20 nt, Artificial Sequence
  source: /note="Description of Artificial Sequence: Synthetic oligonucleotide"
cgggcccaggcaaccggggc

SEQ ID NO: 167 - RNA, 20 nt, Artificial Sequence
  source: /note="Description of Artificial Sequence: Synthetic oligonucleotide"
ccgggcccaggcaaccgggg

SEQ ID NO: 168 - RNA, 20 nt, Artificial Sequence
  source: /note="Description of Artificial Sequence: Synthetic oligonucleotide"
ggaaugaggcgcccucccca

SEQ ID NO: 169 - RNA, 20 nt, Artificial Sequence
  source: /note="Description of Artificial Sequence: Synthetic oligonucleotide"
aacggcggaaagugaagggc

SEQ ID NO: 170 - RNA, 20 nt, Artificial Sequence
  source: /note="Description of Artificial Sequence: Synthetic oligonucleotide"
agguaacggcggaaagugaa

SEQ ID NO: 171 - RNA, 20 nt, Artificial Sequence
  source: /note="Description of Artificial Sequence: Synthetic oligonucleotide"
aagguaacggcggaaaguga

SEQ ID NO: 172 - RNA, 20 nt, Artificial Sequence
  source: /note="Description of Artificial Sequence: Synthetic oligonucleotide"
aaauaccuucaagguaacgg

SEQ ID NO: 173 - RNA, 20 nt, Artificial Sequence
  source: /note="Description of Artificial Sequence: Synthetic oligonucleotide"
uauaaauaccuucaagguaa

SEQ ID NO: 174 - RNA, 20 nt, Artificial Sequence
  source: /note="Description of Artificial Sequence: Synthetic oligonucleotide"
acuuuccgccguuaccuuga

SEQ ID NO: 175 - RNA, 20 nt, Artificial Sequence
  source: /note="Description of Artificial Sequence: Synthetic oligonucleotide"
gaagguauuuauagguagag

SEQ ID NO: 176 - RNA, 20 nt, Artificial Sequence
  source: /note="Description of Artificial Sequence: Synthetic oligonucleotide"
aaaugaggacccuggggagc

SEQ ID NO: 177 - RNA, 20 nt, Artificial Sequence
  source: /note="Description of Artificial Sequence: Synthetic oligonucleotide"
gaggacaacccccgcucccc

SEQ ID NO: 178 - RNA, 20 nt, Artificial Sequence
  source: /note="Description of Artificial Sequence: Synthetic oligonucleotide"
gggcuccugguccagaaaug

SEQ ID NO: 179 - RNA, 20 nt, Artificial Sequence
  source: /note="Description of Artificial Sequence: Synthetic oligonucleotide"
aggguccucauuucuggacc

SEQ ID NO: 180 - RNA, 20 nt, Artificial Sequence
  source: /note="Description of Artificial Sequence: Synthetic oligonucleotide"
ucgggcgaaagaaaacgaua

SEQ ID NO: 181 - RNA, 20 nt, Artificial Sequence
  source: /note="Description of Artificial Sequence: Synthetic oligonucleotide"
cucgggcgaaagaaaacgau

SEQ ID NO: 182 - RNA, 20 nt, Artificial Sequence
  source: /note="Description of Artificial Sequence: Synthetic oligonucleotide"
cuaucguuuucuuucgcccg

SEQ ID NO: 183 - RNA, 20 nt, Artificial Sequence
  source: /note="Description of Artificial Sequence: Synthetic oligonucleotide"
ccaagauugcucuaguccuc

SEQ ID NO: 184 - RNA, 20 nt, Artificial Sequence
  source: /note="Description of Artificial Sequence: Synthetic oligonucleotide"
accaagauugcucuaguccu

SEQ ID NO: 185 - RNA, 20 nt, Artificial Sequence
  source: /note="Description of Artificial Sequence: Synthetic oligonucleotide"
cccgaggacuagagcaaucu

SEQ ID NO: 186 - RNA, 20 nt, Artificial Sequence
  source: /note="Description of Artificial Sequence: Synthetic oligonucleotide"
aggacuagagcaaucuuggu

SEQ ID NO: 187 - RNA, 20 nt, Artificial Sequence
  source: /note="Description of Artificial Sequence: Synthetic oligonucleotide"
ggacuagagcaaucuugguu

SEQ ID NO: 188 - RNA, 20 nt, Artificial Sequence
  source: /note="Description of Artificial Sequence: Synthetic oligonucleotide"
cuagagcaaucuugguuggg

SEQ ID NO: 189 - RNA, 20 nt, Artificial Sequence
  source: /note="Description of Artificial Sequence: Synthetic oligonucleotide"
guaugcaugagggauaaugu

SEQ ID NO: 190 - RNA, 20 nt, Artificial Sequence
  source: /note="Description of Artificial Sequence: Synthetic oligonucleotide"
uaauguuggggagaagcgaa

SEQ ID NO: 191 - RNA, 20 nt, Artificial Sequence
  source: /note="Description of Artificial Sequence: Synthetic oligonucleotide"
gaagcgaaaggguuaaugcu

SEQ ID NO: 192 - RNA, 20 nt, Artificial Sequence
  source: /note="Description of Artificial Sequence: Synthetic oligonucleotide"
aagcgaaaggguuaaugcug

SEQ ID NO: 193 - RNA, 20 nt, Artificial Sequence
  source: /note="Description of Artificial Sequence: Synthetic oligonucleotide"
guuaaugcuggggucacuug

SEQ ID NO: 194 - RNA, 20 nt, Artificial Sequence
  source: /note="Description of Artificial Sequence: Synthetic oligonucleotide"
gucacuugaggcugugugug

SEQ ID NO: 195 - RNA, 20 nt, Artificial Sequence
  source: /note="Description of Artificial Sequence: Synthetic oligonucleotide"
guuaaugcuggagaacccua

SEQ ID NO: 196 - RNA, 20 nt, Artificial Sequence
  source: /note="Description of Artificial Sequence: Synthetic oligonucleotide"
uucccccacacaggaccuua

SEQ ID NO: 197 - RNA, 20 nt, Artificial Sequence
  source: /note="Description of Artificial Sequence: Synthetic oligonucleotide"
cuucccccacacaggaccuu

SEQ ID NO: 198 - RNA, 20 nt, Artificial Sequence
  source: /note="Description of Artificial Sequence: Synthetic oligonucleotide"
gagaacccuaagguccugug

SEQ ID NO: 199 - RNA, 20 nt, Artificial Sequence
  source: /note="Description of Artificial Sequence: Synthetic oligonucleotide"
cuaagguccuguguggggga

SEQ ID NO: 200 - RNA, 20 nt, Artificial Sequence
  source: /note="Description of Artificial Sequence: Synthetic oligonucleotide"
uaagguccugugugggggaa

SEQ ID NO: 201 - RNA, 20 nt, Artificial Sequence
  source: /note="Description of Artificial Sequence: Synthetic oligonucleotide"
gggaaaagugcagggaucau

SEQ ID NO: 202 - RNA, 20 nt, Artificial Sequence
  source: /note="Description of Artificial Sequence: Synthetic oligonucleotide"
auugguaugggacaacccaa

SEQ ID NO: 203 - RNA, 20 nt, Artificial Sequence
  source: /note="Description of Artificial Sequence: Synthetic oligonucleotide"
ccccuuuacuuuucuccauu

SEQ ID NO: 204 - RNA, 20 nt, Artificial Sequence
  source: /note="Description of Artificial Sequence: Synthetic oligonucleotide"
uaaugaugggagacuccuga

SEQ ID NO: 205 - RNA, 20 nt, Artificial Sequence
  source: /note="Description of Artificial Sequence: Synthetic oligonucleotide"
ggagacuccugacgguguau

SEQ ID NO: 206 - RNA, 20 nt, Artificial Sequence
  source: /note="Description of Artificial Sequence: Synthetic oligonucleotide"
auaggaucagaguguacaag

SEQ ID NO: 207 - RNA, 20 nt, Artificial Sequence
  source: /note="Description of Artificial Sequence: Synthetic oligonucleotide"
gaucagaguguacaaguggc

SEQ ID NO: 208 - RNA, 20 nt, Artificial Sequence
  source: /note="Description of Artificial Sequence: Synthetic oligonucleotide"
aucagaguguacaaguggcu

SEQ ID NO: 209 - RNA, 20 nt, Artificial Sequence
  source: /note="Description of Artificial Sequence: Synthetic oligonucleotide"
aguggcugggauucuugccg

SEQ ID NO: 210 - RNA, 20 nt, Artificial Sequence
  source: /note="Description of Artificial Sequence: Synthetic oligonucleotide"
gauucuugccgaggaaacga

SEQ ID NO: 211 - RNA, 20 nt, Artificial Sequence
  source: /note="Description of Artificial Sequence: Synthetic oligonucleotide"
uugccgaggaaacgaaggca

SEQ ID NO: 212 - RNA, 20 nt, Artificial Sequence
  source: /note="Description of Artificial Sequence: Synthetic oligonucleotide"
ggaaacgaaggcauggcagu

SEQ ID NO: 213 - RNA, 20 nt, Artificial Sequence
  source: /note="Description of Artificial Sequence: Synthetic oligonucleotide"
caguaggaugugcgugugca

SEQ ID NO: 214 - RNA, 20 nt, Artificial Sequence
  source: /note="Description of Artificial Sequence: Synthetic oligonucleotide"
uggaugugagggcaggacug

SEQ ID NO: 215 - RNA, 20 nt, Artificial Sequence
  source: /note="Description of Artificial Sequence: Synthetic oligonucleotide"
ugugaaugaagggaggcguc

SEQ ID NO: 216 - RNA, 20 nt, Artificial Sequence
  source: /note="Description of Artificial Sequence: Synthetic oligonucleotide"
auugauggaagaagaccagg

SEQ ID NO: 217 - RNA, 20 nt, Artificial Sequence
  source: /note="Description of Artificial Sequence: Synthetic oligonucleotide"
gcagugcaggaucuguauaa

SEQ ID NO: 218 - RNA, 20 nt, Artificial Sequence
  source: /note="Description of Artificial Sequence: Synthetic oligonucleotide"
cagugcaggaucuguauaaa

SEQ ID NO: 219 - RNA, 20 nt, Artificial Sequence
  source: /note="Description of Artificial Sequence: Synthetic oligonucleotide"
aguuauugauggggagacgg

SEQ ID NO: 220 - RNA, 20 nt, Artificial Sequence
  source: /note="Description of Artificial Sequence: Synthetic oligonucleotide"
acggaggcaugcugagggua

SEQ ID NO: 221 - RNA, 20 nt, Artificial Sequence
  source: /note="Description of Artificial Sequence: Synthetic oligonucleotide"
augcugaggguaggggccau

SEQ ID NO: 222 - RNA, 20 nt, Artificial Sequence
  source: /note="Description of Artificial Sequence: Synthetic oligonucleotide"
ugcugaggguaggggccauu

SEQ ID NO: 223 - RNA, 20 nt, Artificial Sequence
  source: /note="Description of Artificial Sequence: Synthetic oligonucleotide"
guaggggccauugggauaga

SEQ ID NO: 224 - RNA, 20 nt, Artificial Sequence
  source: /note="Description of Artificial Sequence: Synthetic oligonucleotide"
ccauugggauagaaggugug

SEQ ID NO: 225 - RNA, 20 nt, Artificial Sequence
  source: /note="Description of Artificial Sequence: Synthetic oligonucleotide"
ucaguuuaccucccagccca

SEQ ID NO: 226 - RNA, 20 nt, Artificial Sequence
  source: /note="Description of Artificial Sequence: Synthetic oligonucleotide"
ggcagugagcugcaaaguug

SEQ ID NO: 227 - RNA, 20 nt, Artificial Sequence
  source: /note="Description of Artificial Sequence: Synthetic oligonucleotide"
aggaagugcuuaggggaugg

SEQ ID NO: 228 - RNA, 20 nt, Artificial Sequence
  source: /note="Description of Artificial Sequence: Synthetic oligonucleotide"
cagcggggcauugugggccu

SEQ ID NO: 229 - RNA, 20 nt, Artificial Sequence
  source: /note="Description of Artificial Sequence: Synthetic oligonucleotide"
ucagcggggcauugugggcc

SEQ ID NO: 230 - RNA, 20 nt, Artificial Sequence
  source: /note="Description of Artificial Sequence: Synthetic oligonucleotide"
ccggcucagcggggcauugu

SEQ ID NO: 231 - RNA, 20 nt, Artificial Sequence
  source: /note="Description of Artificial Sequence: Synthetic oligonucleotide"
agcugcugcaccggcucagc

SEQ ID NO: 232 - RNA, 20 nt, Artificial Sequence
  source: /note="Description of Artificial Sequence: Synthetic oligonucleotide"
gauccacucagcugcugcac

SEQ ID NO: 233 - RNA, 20 nt, Artificial Sequence
  source: /note="Description of Artificial Sequence: Synthetic oligonucleotide"
uccaucggauuuucucugcu

SEQ ID NO: 234 - RNA, 20 nt, Artificial Sequence
  source: /note="Description of Artificial Sequence: Synthetic oligonucleotide"
uccaagcagagaaaauccga

SEQ ID NO: 235 - RNA, 20 nt, Artificial Sequence
  source: /note="Description of Artificial Sequence: Synthetic oligonucleotide"
agcagagaaaauccgaugga

SEQ ID NO: 236 - RNA, 20 nt, Artificial Sequence
  source: /note="Description of Artificial Sequence: Synthetic oligonucleotide"
aaauccgauggaggggucuc

SEQ ID NO: 237 - RNA, 20 nt, Artificial Sequence
  source: /note="Description of Artificial Sequence: Synthetic oligonucleotide"
ggggacgaucuggugcagcc

SEQ ID NO: 238 - RNA, 20 nt, Artificial Sequence
  source: /note="Description of Artificial Sequence: Synthetic oligonucleotide"
ucugggccuuggggacgauc

SEQ ID NO: 239 - RNA, 20 nt, Artificial Sequence
  source: /note="Description of Artificial Sequence: Synthetic oligonucleotide"
gcugcaccagaucgucccca

SEQ ID NO: 240 - RNA, 20 nt, Artificial Sequence
  source: /note="Description of Artificial Sequence: Synthetic oligonucleotide"
gccgggccaggcagucucuc

SEQ ID NO: 241 - RNA, 20 nt, Artificial Sequence
  source: /note="Description of Artificial Sequence: Synthetic oligonucleotide"
uucucccuuggcgccgggcc

SEQ ID NO: 242 - RNA, 20 nt, Artificial Sequence
  source: /note="Description of Artificial Sequence: Synthetic oligonucleotide"
cgauguucucccuuggcgcc

SEQ ID NO: 243 - RNA, 20 nt, Artificial Sequence
  source: /note="Description of Artificial Sequence: Synthetic oligonucleotide"
ucgauguucucccuuggcgc

SEQ ID NO: 244 - RNA, 20 nt, Artificial Sequence
  source: /note="Description of Artificial Sequence: Synthetic oligonucleotide"
ccacccucgauguucucccu

SEQ ID NO: 245 - RNA, 20 nt, Artificial Sequence
  source: /note="Description of Artificial Sequence: Synthetic oligonucleotide"
ggcgccaagggagaacaucg

SEQ ID NO: 246 - RNA, 20 nt, Artificial Sequence
  source: /note="Description of Artificial Sequence: Synthetic oligonucleotide"
gcgccaagggagaacaucga

SEQ ID NO: 247 - RNA, 20 nt, Artificial Sequence
  source: /note="Description of Artificial Sequence: Synthetic oligonucleotide"
caagggagaacaucgagggu

SEQ ID NO: 248 - RNA, 20 nt, Artificial Sequence
  source: /note="Description of Artificial Sequence: Synthetic oligonucleotide"
cuuggugacaggcagguaac

SEQ ID NO: 249 - RNA, 20 nt, Artificial Sequence
  source: /note="Description of Artificial Sequence: Synthetic oligonucleotide"
uuaccugccugucaccaagg

SEQ ID NO: 250 - RNA, 20 nt, Artificial Sequence
  source: /note="Description of Artificial Sequence: Synthetic oligonucleotide"
uaccugccugucaccaagga

SEQ ID NO: 251 - RNA, 20 nt, Artificial Sequence
  source: /note="Description of Artificial Sequence: Synthetic oligonucleotide"
aaugucucgggggcccuccu

SEQ ID NO: 252 - RNA, 20 nt, Artificial Sequence
  source: /note="Description of Artificial Sequence: Synthetic oligonucleotide"
ugccauccagaaugucucgg

SEQ ID NO: 253 - RNA, 20 nt, Artificial Sequence
  source: /note="Description of Artificial Sequence: Synthetic oligonucleotide"
cugccauccagaaugucucg

SEQ ID NO: 254 - RNA, 20 nt, Artificial Sequence
  source: /note="Description of Artificial Sequence: Synthetic oligonucleotide"
ggagggcccccgagacauuc

SEQ ID NO: 255 - RNA, 20 nt, Artificial Sequence
  source: /note="Description of Artificial Sequence: Synthetic oligonucleotide"
ggcccccgagacauucugga

SEQ ID NO: 256 - RNA, 20 nt, Artificial Sequence
  source: /note="Description of Artificial Sequence: Synthetic oligonucleotide"
cgagacauucuggauggcag

SEQ ID NO: 257 - RNA, 20 nt, Artificial Sequence
  source: /note="Description of Artificial Sequence: Synthetic oligonucleotide"
ggcaucucugguaagagaau

SEQ ID NO: 258 - RNA, 20 nt, Artificial Sequence
  source: /note="Description of Artificial Sequence: Synthetic oligonucleotide"
ugguaagagaaugggccgug

SEQ ID NO: 259 - RNA, 20 nt, Artificial Sequence
  source: /note="Description of Artificial Sequence: Synthetic oligonucleotide"
gaaugggccguguggccccc

SEQ ID NO: 260 - RNA, 20 nt, Artificial Sequence
  source: /note="Description of Artificial Sequence: Synthetic oligonucleotide"
aaugggccguguggccccca

SEQ ID NO: 261 - RNA, 20 nt, Artificial Sequence
  source: /note="Description of Artificial Sequence: Synthetic oligonucleotide"
gaaugggcuggaugcucccu

SEQ ID NO: 262 - RNA, 20 nt, Artificial Sequence
  source: /note="Description of Artificial Sequence: Synthetic oligonucleotide"
ggaaugggcuggaugcuccc

SEQ ID NO: 263 - RNA, 20 nt, Artificial Sequence
  source: /note="Description of Artificial Sequence: Synthetic oligonucleotide"
cagcgcagcagcggcugagc

SEQ ID NO: 264 - RNA, 20 nt, Artificial Sequence
  source: /note="Description of Artificial Sequence: Synthetic oligonucleotide"
agcgcagcagcggcugagcu

SEQ ID NO: 265 - RNA, 20 nt, Artificial Sequence
  source: /note="Description of Artificial Sequence: Synthetic oligonucleotide"
gcugggaugcugauuccgcu

SEQ ID NO: 266 - RNA, 20 nt, Artificial Sequence
  source: /note="Description of Artificial Sequence: Synthetic oligonucleotide"
cugggaugcugauuccgcuu

SEQ ID NO: 267 - RNA, 20 nt, Artificial Sequence
  source: /note="Description of Artificial Sequence: Synthetic oligonucleotide"
uaccacccaguggggagccu

SEQ ID NO: 268 - RNA, 20 nt, Artificial Sequence
  source: /note="Description of Artificial Sequence: Synthetic oligonucleotide"
cagcuccauaccacccagug

SEQ ID NO: 269 - RNA, 20 nt, Artificial Sequence
  source: /note="Description of Artificial Sequence: Synthetic oligonucleotide"
ccaauuaguaugcucagagg

SEQ ID NO: 270 - RNA, 20 nt, Artificial Sequence
  source: /note="Description of Artificial Sequence: Synthetic oligonucleotide"
gacccaauuaguaugcucag

SEQ ID NO: 271 - RNA, 20 nt, Artificial Sequence
  source: /note="Description of Artificial Sequence: Synthetic oligonucleotide"
ggggugcugagaugggccuc

SEQ ID NO: 272 - RNA, 20 nt, Artificial Sequence
  source: /note="Description of Artificial Sequence: Synthetic oligonucleotide"
ggaauaagugggcugggggc

SEQ ID NO: 273 - RNA, 20 nt, Artificial Sequence
  source: /note="Description of Artificial Sequence: Synthetic oligonucleotide"
cuguggaauaagugggcugg

SEQ ID NO: 274 - RNA, 20 nt, Artificial Sequence
  source: /note="Description of Artificial Sequence: Synthetic oligonucleotide"
ccuguggaauaagugggcug

SEQ ID NO: 275 - RNA, 20 nt, Artificial Sequence
  source: /note="Description of Artificial Sequence: Synthetic oligonucleotide"
accuguggaauaagugggcu

SEQ ID NO: 276 - RNA, 20 nt, Artificial Sequence
  source: /note="Description of Artificial Sequence: Synthetic oligonucleotide"
uaccuguggaauaagugggc

SEQ ID NO: 277 - RNA, 20 nt, Artificial Sequence
  source: /note="Description of Artificial Sequence: Synthetic oligonucleotide"
ggaauaccuguggaauaagu

SEQ ID NO: 278 - RNA, 20 nt, Artificial Sequence
  source: /note="Description of Artificial Sequence: Synthetic oligonucleotide"
ccccagcccacuuauuccac

SEQ ID NO: 279 - RNA, 20 nt, Artificial Sequence
  source: /note="Description of Artificial Sequence: Synthetic oligonucleotide"
ccagacagccagagggagcu

SEQ ID NO: 280 - RNA, 20 nt, Artificial Sequence
  source: /note="Description of Artificial Sequence: Synthetic oligonucleotide"
gcuguuuuggcccgugguuc

SEQ ID NO: 281 - RNA, 20 nt, Artificial Sequence
  source: /note="Description of Artificial Sequence: Synthetic oligonucleotide"
guauccuguuccugaaccac

SEQ ID NO: 282 - RNA, 20 nt, Artificial Sequence
  source: /note="Description of Artificial Sequence: Synthetic oligonucleotide"
cuucuguaguggcuagggag

SEQ ID NO: 283 - RNA, 20 nt, Artificial Sequence
  source: /note="Description of Artificial Sequence: Synthetic oligonucleotide"
ggcuggguagucagcgaugc

SEQ ID NO: 284 - RNA, 20 nt, Artificial Sequence
  source: /note="Description of Artificial Sequence: Synthetic oligonucleotide"
cuuuuugcuggguaaaccaa

SEQ ID NO: 285 - RNA, 20 nt, Artificial Sequence
  source: /note="Description of Artificial Sequence: Synthetic oligonucleotide"
ccuuuuugcuggguaaacca

SEQ ID NO: 286 - RNA, 20 nt, Artificial Sequence
  source: /note="Description of Artificial Sequence: Synthetic oligonucleotide"
agugugagauaccuuuuugc

SEQ ID NO: 287 - RNA, 20 nt, Artificial Sequence
  source: /note="Description of Artificial Sequence: Synthetic oligonucleotide"
gaauaacacgucuggaggug

SEQ ID NO: 288 - RNA, 20 nt, Artificial Sequence
  source: /note="Description of Artificial Sequence: Synthetic oligonucleotide"
ugaauaacacgucuggaggu

SEQ ID NO: 289 - RNA, 20 nt, Artificial Sequence
  source: /note="Description of Artificial Sequence: Synthetic oligonucleotide"
augaauaacacgucuggagg

SEQ ID NO: 290 - RNA, 20 nt, Artificial Sequence
  source: /note="Description of Artificial Sequence: Synthetic oligonucleotide"
cacauacccuggcacaccga

SEQ ID NO: 291 - RNA, 20 nt, Artificial Sequence
  source: /note="Description of Artificial Sequence: Synthetic oligonucleotide"
cauucaaaugccacucuauc

SEQ ID NO: 292 - RNA, 20 nt, Artificial Sequence
  source: /note="Description of Artificial Sequence: Synthetic oligonucleotide"
accagguccuuggacacguc

SEQ ID NO: 293 - RNA, 20 nt, Artificial Sequence
  source: /note="Description of Artificial Sequence: Synthetic oligonucleotide"
aggcauaccagccuccuacc

SEQ ID NO: 294 - RNA, 20 nt, Artificial Sequence
  source: /note="Description of Artificial Sequence: Synthetic oligonucleotide"
uugcaaaagccuuggcacgg

SEQ ID NO: 295 - RNA, 20 nt, Artificial Sequence
  source: /note="Description of Artificial Sequence: Synthetic oligonucleotide"
agaugaucuugcaaaagccu

SEQ ID NO: 296 - RNA, 20 nt, Artificial Sequence
  source: /note="Description of Artificial Sequence: Synthetic oligonucleotide"
auaaugaaggcuauuccaca

SEQ ID NO: 297 - RNA, 20 nt, Artificial Sequence
  source: /note="Description of Artificial Sequence: Synthetic oligonucleotide"
aauaaugaaggcuauuccac

SEQ ID NO: 298 - RNA, 20 nt, Artificial Sequence
  source: /note="Description of Artificial Sequence: Synthetic oligonucleotide"
aagguggccagagcagguca

SEQ ID NO: 299 - RNA, 20 nt, Artificial Sequence
  source: /note="Description of Artificial Sequence: Synthetic oligonucleotide"
cacagauccuugaccugcuc

SEQ ID NO: 300 - RNA, 20 nt, Artificial Sequence
  source: /note="Description of Artificial Sequence: Synthetic oligonucleotide"
agcaucaugaguuguaaagg

SEQ ID NO: 301 - RNA, 20 nt, Artificial Sequence
  source: /note="Description of Artificial Sequence: Synthetic oligonucleotide"
ccgagcaucaugaguuguaa

SEQ ID NO: 302 - RNA, 20 nt, Artificial Sequence
  source: /note="Description of Artificial Sequence: Synthetic oligonucleotide"
caccgcugugccccagggcg

SEQ ID NO: 303 - RNA, 20 nt, Artificial Sequence
  source: /note="Description of Artificial Sequence: Synthetic oligonucleotide"
ucagucaccgcugugcccca

SEQ ID NO: 304 - RNA, 20 nt, Artificial Sequence
  source: /note="Description of Artificial Sequence: Synthetic oligonucleotide"
ugguggggucuaugagagcg

SEQ ID NO: 305 - RNA, 20 nt, Artificial Sequence
  source: /note="Description of Artificial Sequence: Synthetic oligonucleotide"
ucuccccagccucagauggu

SEQ ID NO: 306 - RNA, 20 nt, Artificial Sequence
  source: /note="Description of Artificial Sequence: Synthetic oligonucleotide"
gucuccccagccucagaugg

SEQ ID NO: 307 - RNA, 20 nt, Artificial Sequence
  source: /note="Description of Artificial Sequence: Synthetic oligonucleotide"
cauaacaccgggucauaaca

SEQ ID NO: 308 - RNA, 20 nt, Artificial Sequence
  source: /note="Description of Artificial Sequence: Synthetic oligonucleotide"
acaccuggugacauaacacc

SEQ ID NO: 309 - RNA, 20 nt, Artificial Sequence
  source: /note="Description of Artificial Sequence: Synthetic oligonucleotide"
aacaccuggugacauaacac

SEQ ID NO: 310 - RNA, 20 nt, Artificial Sequence
  source: /note="Description of Artificial Sequence: Synthetic oligonucleotide"
agccgcugugucauaacacc

SEQ ID NO: 311 - RNA, 20 nt, Artificial Sequence
  source: /note="Description of Artificial Sequence: Synthetic oligonucleotide"
cuagaugcuugcuucccccu

SEQ ID NO: 312 - RNA, 20 nt, Artificial Sequence
  source: /note="Description of Artificial Sequence: Synthetic oligonucleotide"
aucugcaggugucaggcagu

SEQ ID NO: 313 - RNA, 20 nt, Artificial Sequence
  source: /note="Description of Artificial Sequence: Synthetic oligonucleotide"
uggcaaggugagaccccuga

SEQ ID NO: 314 - RNA, 20 nt, Artificial Sequence
  source: /note="Description of Artificial Sequence: Synthetic oligonucleotide"
gagugcugauacucuggagu

SEQ ID NO: 315 - RNA, 20 nt, Artificial Sequence
  source: /note="Description of Artificial Sequence: Synthetic oligonucleotide"
uucccugagugcugauacuc

SEQ ID NO: 316 - RNA, 20 nt, Artificial Sequence
  source: /note="Description of Artificial Sequence: Synthetic oligonucleotide"
guuauuaauggcuuagagga

SEQ ID NO: 317 - RNA, 20 nt, Artificial Sequence
  source: /note="Description of Artificial Sequence: Synthetic oligonucleotide"
cucaguuauuaauggcuuag

SEQ ID NO: 318 - RNA, 20 nt, Artificial Sequence
  source: /note="Description of Artificial Sequence: Synthetic oligonucleotide"
agccugaggguacaggcucu

SEQ ID NO: 319 - RNA, 20 nt, Artificial Sequence
  source: /note="Description of Artificial Sequence: Synthetic oligonucleotide"
guacaggcucuagggauccc

SEQ ID NO: 320 - RNA, 20 nt, Artificial Sequence
  source: /note="Description of Artificial Sequence: Synthetic oligonucleotide"
uacaggcucuagggauccca

SEQ ID NO: 321 - RNA, 20 nt, Artificial Sequence
  source: /note="Description of Artificial Sequence: Synthetic oligonucleotide"
ccucggaaccagacccagag

SEQ ID NO: 322 - RNA, 20 nt, Artificial Sequence
  source: /note="Description of Artificial Sequence: Synthetic oligonucleotide"
ugggucugguuccgagggau

SEQ ID NO: 323 - RNA, 20 nt, Artificial Sequence
  source: /note="Description of Artificial Sequence: Synthetic oligonucleotide"
cucuaccucgcagaugcccc

SEQ ID NO: 324 - RNA, 20 nt, Artificial Sequence
  source: /note="Description of Artificial Sequence: Synthetic oligonucleotide"
ucgcagaugccccaggucug

SEQ ID NO: 325 - RNA, 20 nt, Artificial Sequence
  source: /note="Description of Artificial Sequence: Synthetic oligonucleotide"
gugauuccccagugggagug

SEQ ID NO: 326 - RNA, 20 nt, Artificial Sequence
  source: /note="Description of Artificial Sequence: Synthetic oligonucleotide"
acccugggugauuccccagu

SEQ ID NO: 327 - RNA, 20 nt, Artificial Sequence
  source: /note="Description of Artificial Sequence: Synthetic oligonucleotide"
cagaugcacguaugagaccc

SEQ ID NO: 328 - RNA, 20 nt, Artificial Sequence
  source: /note="Description of Artificial Sequence: Synthetic oligonucleotide"
cgugcaucuguuuuauagcu

SEQ ID NO: 329 - RNA, 20 nt, Artificial Sequence
  source: /note="Description of Artificial Sequence: Synthetic oligonucleotide"
gugcaucuguuuuauagcuu

SEQ ID NO: 330 - RNA, 20 nt, Artificial Sequence
  source: /note="Description of Artificial Sequence: Synthetic oligonucleotide"
ugagggaaaccuucaagggu

SEQ ID NO: 331 - RNA, 20 nt, Artificial Sequence
  source: /note="Description of Artificial Sequence: Synthetic oligonucleotide"
ggggccaggcccacccuuga

SEQ ID NO: 332 - RNA, 20 nt, Artificial Sequence
  source: /note="Description of Artificial Sequence: Synthetic oligonucleotide"
ugaagguuucccucagcagc

SEQ ID NO: 333 - RNA, 20 nt, Artificial Sequence
  source: /note="Description of Artificial Sequence: Synthetic oligonucleotide"
aagguuucccucagcagcug

SEQ ID NO: 334 - RNA, 20 nt, Artificial Sequence
  source: /note="Description of Artificial Sequence: Synthetic oligonucleotide"
gggauaggaauggcuugacu

SEQ ID NO: 335 - RNA, 20 nt, Artificial Sequence
  source: /note="Description of Artificial Sequence: Synthetic oligonucleotide"
ugaggucauggccugaaugu

SEQ ID NO: 336 - RNA, 20 nt, Artificial Sequence
  source: /note="Description of Artificial Sequence: Synthetic oligonucleotide"
agacguggugucccaaaccc

SEQ ID NO: 337 - RNA, 20 nt, Artificial Sequence
  source: /note="Description of Artificial Sequence: Synthetic oligonucleotide"
ggagaucaagcgggcagaga

SEQ ID NO: 338 - RNA, 20 nt, Artificial Sequence
  source: /note="Description of Artificial Sequence: Synthetic oligonucleotide"
cccggagggggagaucaagc

SEQ ID NO: 339 - RNA, 20 nt, Artificial Sequence
  source: /note="Description of Artificial Sequence: Synthetic oligonucleotide"
ucccggagggggagaucaag

SEQ ID NO: 340 - RNA, 20 nt, Artificial Sequence
  source: /note="Description of Artificial Sequence: Synthetic oligonucleotide"
gcccgcuugaucucccccuc

SEQ ID NO: 341 - RNA, 20 nt, Artificial Sequence
  source: /note="Description of Artificial Sequence: Synthetic oligonucleotide"
aggugcccgugucccggagg

SEQ ID NO: 342 - RNA, 20 nt, Artificial Sequence
  source: /note="Description of Artificial Sequence: Synthetic oligonucleotide"
caggugcccgugucccggag

SEQ ID NO: 343 - RNA, 20 nt, Artificial Sequence
  source: /note="Description of Artificial Sequence: Synthetic oligonucleotide"
gcaggugcccgugucccgga

SEQ ID NO: 344 - RNA, 20 nt, Artificial Sequence
  source: /note="Description of Artificial Sequence: Synthetic oligonucleotide"
ggcaggugcccgugucccgg

SEQ ID NO: 345 - RNA, 20 nt, Artificial Sequence
  source: /note="Description of Artificial Sequence: Synthetic oligonucleotide"
ugaucucccccuccgggaca

SEQ ID NO: 346 - RNA, 20 nt, Artificial Sequence
  source: /note="Description of Artificial Sequence: Synthetic oligonucleotide"
gaucucccccuccgggacac

SEQ ID NO: 347 - RNA, 20 nt, Artificial Sequence
  source: /note="Description of Artificial Sequence: Synthetic oligonucleotide"
caucacaagacuaguagggc

SEQ ID NO: 348 - RNA, 20 nt, Artificial Sequence
  source: /note="Description of Artificial Sequence: Synthetic oligonucleotide"
uaggcaucacaagacuagua

SEQ ID NO: 349 - RNA, 20 nt, Artificial Sequence
  source: /note="Description of Artificial Sequence: Synthetic oligonucleotide"
auaggcaucacaagacuagu

SEQ ID NO: 350 - RNA, 20 nt, Artificial Sequence
  source: /note="Description of Artificial Sequence: Synthetic oligonucleotide"
cagagccuguuccuauuuau

SEQ ID NO: 351 - RNA, 20 nt, Artificial Sequence
  source: /note="Description of Artificial Sequence: Synthetic oligonucleotide"
ugaugccuauaaauaggaac

SEQ ID NO: 352 - RNA, 20 nt, Artificial Sequence
  source: /note="Description of Artificial Sequence: Synthetic oligonucleotide"
cuauaaauaggaacaggcuc

SEQ ID NO: 353 - RNA, 20 nt, Artificial Sequence
  source: /note="Description of Artificial Sequence: Synthetic oligonucleotide"
uauaaauaggaacaggcucu

SEQ ID NO: 354 - RNA, 20 nt, Artificial Sequence
  source: /note="Description of Artificial Sequence: Synthetic oligonucleotide"
ugcuauuccaccccaaagcc

SEQ ID NO: 355 - RNA, 20 nt, Artificial Sequence
  source: /note="Description of Artificial Sequence: Synthetic oligonucleotide"
ugagggcugaguggggauaa

SEQ ID NO: 356 - RNA, 20 nt, Artificial Sequence
  source: /note="Description of Artificial Sequence: Synthetic oligonucleotide"
cacuccagugugcucuuggg

SEQ ID NO: 357 - RNA, 20 nt, Artificial Sequence
  source: /note="Description of Artificial Sequence: Synthetic oligonucleotide"
ccacuccagugugcucuugg

SEQ ID NO: 358 - RNA, 20 nt, Artificial Sequence
  source: /note="Description of Artificial Sequence: Synthetic oligonucleotide"
gccacuccagugugcucuug

SEQ ID NO: 359 - RNA, 20 nt, Artificial Sequence
  source: /note="Description of Artificial Sequence: Synthetic oligonucleotide"
ccugcccaggcagggaaguu

SEQ ID NO: 360 - RNA, 20 nt, Artificial Sequence
  source: /note="Description of Artificial Sequence: Synthetic oligonucleotide"
accuccaaacuucccugccu

SEQ ID NO: 361 - RNA, 20 nt, Artificial Sequence
  source: /note="Description of Artificial Sequence: Synthetic oligonucleotide"
ggcacaccccugcccaggca

SEQ ID NO: 362 - RNA, 20 nt, Artificial Sequence
  source: /note="Description of Artificial Sequence: Synthetic oligonucleotide"
ccaaacuucccugccugggc

SEQ ID NO: 363 - RNA, 20 nt, Artificial Sequence
  source: /note="Description of Artificial Sequence: Synthetic oligonucleotide"
caaacuucccugccugggca

SEQ ID NO: 364 - RNA, 20 nt, Artificial Sequence
  source: /note="Description of Artificial Sequence: Synthetic oligonucleotide"
gccguaacgggggacagagg

SEQ ID NO: 365 - RNA, 20 nt, Artificial Sequence
  source: /note="Description of Artificial Sequence: Synthetic oligonucleotide"
acagccguaacgggggacag

SEQ ID NO: 366 - RNA, 20 nt, Artificial Sequence
  source: /note="Description of Artificial Sequence: Synthetic oligonucleotide"
gccuccucugucccccguua

SEQ ID NO: 367 - RNA, 20 nt, Artificial Sequence
  source: /note="Description of Artificial Sequence: Synthetic oligonucleotide"
uggguaaacagccguaacgg

SEQ ID NO: 368 - RNA, 20 nt, Artificial Sequence
  source: /note="Description of Artificial Sequence: Synthetic oligonucleotide"
cuggguaaacagccguaacg

SEQ ID NO: 369 - RNA, 20 nt, Artificial Sequence
  source: /note="Description of Artificial Sequence: Synthetic oligonucleotide"
cucuggguaaacagccguaa

SEQ ID NO: 370 - RNA, 20 nt, Artificial Sequence
  source: /note="Description of Artificial Sequence: Synthetic oligonucleotide"
ccagguucagaaaagacuca

SEQ ID NO: 371 - RNA, 20 nt, Artificial Sequence
  source: /note="Description of Artificial Sequence: Synthetic oligonucleotide"
cagguucagaaaagacucag

SEQ ID NO: 372 - RNA, 20 nt, Artificial Sequence
  source: /note="Description of Artificial Sequence: Synthetic oligonucleotide"
guauggaucgaugaagaguc

SEQ ID NO: 373 - RNA, 20 nt, Artificial Sequence
  source: /note="Description of Artificial Sequence: Synthetic oligonucleotide"
aaugauaugucauuuguccc

SEQ ID NO: 374 - RNA, 20 nt, Artificial Sequence
  source: /note="Description of Artificial Sequence: Synthetic oligonucleotide"
gcugucuugaggccccagcc

SEQ ID NO: 375 - RNA, 20 nt, Artificial Sequence
  source: /note="Description of Artificial Sequence: Synthetic oligonucleotide"
ucugauuuucuccccaggcu

SEQ ID NO: 376 - RNA, 20 nt, Artificial Sequence
  source: /note="Description of Artificial Sequence: Synthetic oligonucleotide"
caugcucugauuuucucccc

SEQ ID NO: 377 - RNA, 20 nt, Artificial Sequence
  source: /note="Description of Artificial Sequence: Synthetic oligonucleotide"
gcauggagugaccggaccug

SEQ ID NO: 378 - RNA, 20 nt, Artificial Sequence
  source: /note="Description of Artificial Sequence: Synthetic oligonucleotide"
agugaccggaccugaggcuc

SEQ ID NO: 379 - RNA, 20 nt, Artificial Sequence
  source: /note="Description of Artificial Sequence: Synthetic oligonucleotide"
gugaccggaccugaggcucu

SEQ ID NO: 380 - RNA, 20 nt, Artificial Sequence
  source: /note="Description of Artificial Sequence: Synthetic oligonucleotide"
gguucagcgaugucucaagg

SEQ ID NO: 381 - RNA, 20 nt, Artificial Sequence
  source: /note="Description of Artificial Sequence: Synthetic oligonucleotide"
ugguucagcgaugucucaag

SEQ ID NO: 382 - RNA, 20 nt, Artificial Sequence
  source: /note="Description of Artificial Sequence: Synthetic oligonucleotide"
cugguucagcgaugucucaa

SEQ ID NO: 383 - RNA, 20 nt, Artificial Sequence
  source: /note="Description of Artificial Sequence: Synthetic oligonucleotide"
gcugguucagcgaugucuca

SEQ ID NO: 384 - RNA, 20 nt, Artificial Sequence
  source: /note="Description of Artificial Sequence: Synthetic oligonucleotide"
uccagagaaguggcggugga

SEQ ID NO: 385 - RNA, 20 nt, Artificial Sequence
  source: /note="Description of Artificial Sequence: Synthetic oligonucleotide"
agucucgcagggccagcaau

SEQ ID NO: 386 - RNA, 20 nt, Artificial Sequence
  source: /note="Description of Artificial Sequence: Synthetic oligonucleotide"
gccaccgacccagucucgca

SEQ ID NO: 387 - RNA, 20 nt, Artificial Sequence
  source: /note="Description of Artificial Sequence: Synthetic oligonucleotide"
agccaccgacccagucucgc

SEQ ID NO: 388 - RNA, 20 nt, Artificial Sequence
  source: /note="Description of Artificial Sequence: Synthetic oligonucleotide"
auccgaguucaauaccccag

SEQ ID NO: 389 - RNA, 20 nt, Artificial Sequence
  source: /note="Description of Artificial Sequence: Synthetic oligonucleotide"
gauccgaguucaauacccca

SEQ ID NO: 390 - RNA, 20 nt, Artificial Sequence
  source: /note="Description of Artificial Sequence: Synthetic oligonucleotide"
agauccgaguucaauacccc

SEQ ID NO: 391 - RNA, 20 nt, Artificial Sequence
  source: /note="Description of Artificial Sequence: Synthetic oligonucleotide"
ugggguucaacuugguagag

SEQ ID NO: 392 - RNA, 20 nt, Artificial Sequence
  source: /note="Description of Artificial Sequence: Synthetic oligonucleotide"
cagccugaacuccaagccug

SEQ ID NO: 393 - RNA, 20 nt, Artificial Sequence
  source: /note="Description of Artificial Sequence: Synthetic oligonucleotide"
agcauuugcaaacucucucg

SEQ ID NO: 394 - RNA, 20 nt, Artificial Sequence
  source: /note="Description of Artificial Sequence: Synthetic oligonucleotide"
acucucucggggaacccaga

SEQ ID NO: 395 - RNA, 20 nt, Artificial Sequence
  source: /note="Description of Artificial Sequence: Synthetic oligonucleotide"
cuuguuggcuccugccaucu

SEQ ID NO: 396 - RNA, 20 nt, Artificial Sequence
  source: /note="Description of Artificial Sequence: Synthetic oligonucleotide"
ccuuguuggcuccugccauc

SEQ ID NO: 397 - RNA, 20 nt, Artificial Sequence
  source: /note="Description of Artificial Sequence: Synthetic oligonucleotide"
ucucggggaacccagauggc

SEQ ID NO: 398 - RNA, 20 nt, Artificial Sequence
  source: /note="Description of Artificial Sequence: Synthetic oligonucleotide"
ccaugccaaggggcccuugu

SEQ ID NO: 399 - RNA, 20 nt, Artificial Sequence
  source: /note="Description of Artificial Sequence: Synthetic oligonucleotide"
ccaacaagggccccuuggca

SEQ ID NO: 400 - RNA, 20 nt, Artificial Sequence
  source: /note="Description of Artificial Sequence: Synthetic oligonucleotide"
uuaggcaguggccaugccaa

SEQ ID NO: 401 - RNA, 20 nt, Artificial Sequence
  source: /note="Description of Artificial Sequence: Synthetic oligonucleotide"
ggcgcuaggucgcagcccuu

SEQ ID NO: 402 - RNA, 20 nt, Artificial Sequence
  source: /note="Description of Artificial Sequence: Synthetic oligonucleotide"
uacgggucagaugaggcgcu

SEQ ID NO: 403 - RNA, 20 nt, Artificial Sequence
  source: /note="Description of Artificial Sequence: Synthetic oligonucleotide"
gagucccuacgggucagaug

SEQ ID NO: 404 - RNA, 20 nt, Artificial Sequence
  source: /note="Description of Artificial Sequence: Synthetic oligonucleotide"
uagcgccucaucugacccgu

SEQ ID NO: 405 - RNA, 20 nt, Artificial Sequence
  source: /note="Description of Artificial Sequence: Synthetic oligonucleotide"
agcgccucaucugacccgua

SEQ ID NO: 406 - RNA, 20 nt, Artificial Sequence
  source: /note="Description of Artificial Sequence: Synthetic oligonucleotide"
aucugacccguagggacucc

SEQ ID NO: 407 - RNA, 20 nt, Artificial Sequence
  source: /note="Description of Artificial Sequence: Synthetic oligonucleotide"
ccagaggccuccacaguuga

SEQ ID NO: 408 - RNA, 20 nt, Artificial Sequence
  source: /note="Description of Artificial Sequence: Synthetic oligonucleotide"
uccuggauccccaucaacug

SEQ ID NO: 409 - RNA, 20 nt, Artificial Sequence
  source: /note="Description of Artificial Sequence: Synthetic oligonucleotide"
uggauccccaucaacugugg

SEQ ID NO: 410 - RNA, 20 nt, Artificial Sequence
  source: /note="Description of Artificial Sequence: Synthetic oligonucleotide"
uguccaagacaccuuggggg

SEQ ID NO: 411 - RNA, 20 nt, Artificial Sequence
  source: /note="Description of Artificial Sequence: Synthetic oligonucleotide"
cuguguccaagacaccuugg

SEQ ID NO: 412 - RNA, 20 nt, Artificial Sequence
  source: /note="Description of Artificial Sequence: Synthetic oligonucleotide"
ccuguguccaagacaccuug

SEQ ID NO: 413 - RNA, 20 nt, Artificial Sequence
  source: /note="Description of Artificial Sequence: Synthetic oligonucleotide"
cccuguguccaagacaccuu

SEQ ID NO: 414 - RNA, 20 nt, Artificial Sequence
  source: /note="Description of Artificial Sequence: Synthetic oligonucleotide"
ccccaaggugucuuggacac

SEQ ID NO: 415 - RNA, 20 nt, Artificial Sequence
  source: /note="Description of Artificial Sequence: Synthetic oligonucleotide"
cccaaggugucuuggacaca

SEQ ID NO: 416 - RNA, 20 nt, Artificial Sequence
  source: /note="Description of Artificial Sequence: Synthetic oligonucleotide"
cuuggacacagggcacugcu

SEQ ID NO: 417 - RNA, 20 nt, Artificial Sequence
  source: /note="Description of Artificial Sequence: Synthetic oligonucleotide"
agcgaggcuccuauuuuuag

SEQ ID NO: 418 - RNA, 20 nt, Artificial Sequence
  source: /note="Description of Artificial Sequence: Synthetic oligonucleotide"
aagucacugccacuaaaaau

SEQ ID NO: 419 - RNA, 20 nt, Artificial Sequence
  source: /note="Description of Artificial Sequence: Synthetic oligonucleotide"
acuaaaaauaggagccucgc

SEQ ID NO: 420 - RNA, 20 nt, Artificial Sequence
  source: /note="Description of Artificial Sequence: Synthetic oligonucleotide"
uugucugagcaauuccagcg

SEQ ID NO: 421 - RNA, 20 nt, Artificial Sequence
  source: /note="Description of Artificial Sequence: Synthetic oligonucleotide"
cuggaauugcucagacaaag

SEQ ID NO: 422 - RNA, 20 nt, Artificial Sequence
  source: /note="Description of Artificial Sequence: Synthetic oligonucleotide"
gcucagacaaagaggccacg

SEQ ID NO: 423 - RNA, 20 nt, Artificial Sequence
  source: /note="Description of Artificial Sequence: Synthetic oligonucleotide"
ccaagagccaggggaccgcg

SEQ ID NO: 424 - RNA, 20 nt, Artificial Sequence
  source: /note="Description of Artificial Sequence: Synthetic oligonucleotide"
aaagaggccacgcggucccc

SEQ ID NO: 425 - RNA, 20 nt, Artificial Sequence
  source: /note="Description of Artificial Sequence: Synthetic oligonucleotide"
cuaagaauuccaagagccag

SEQ ID NO: 426 - RNA, 20 nt, Artificial Sequence
  source: /note="Description of Artificial Sequence: Synthetic oligonucleotide"
ucuaagaauuccaagagcca

SEQ ID NO: 427 - RNA, 20 nt, Artificial Sequence
  source: /note="Description of Artificial Sequence: Synthetic oligonucleotide"
ccacgcgguccccuggcucu

SEQ ID NO: 428 - RNA, 20 nt, Artificial Sequence
  source: /note="Description of Artificial Sequence: Synthetic oligonucleotide"
aaucgcagaaucaucaaauc

SEQ ID NO: 429 - RNA, 20 nt, Artificial Sequence
  source: /note="Description of Artificial Sequence: Synthetic oligonucleotide"
aucgcagaaucaucaaaucu

SEQ ID NO: 430 - RNA, 20 nt, Artificial Sequence
  source: /note="Description of Artificial Sequence: Synthetic oligonucleotide"
aucaucaaaucugggacgcc

SEQ ID NO: 431 - RNA, 20 nt, Artificial Sequence
  source: /note="Description of Artificial Sequence: Synthetic oligonucleotide"
accccaagcucccaagauuc

SEQ ID NO: 432 - RNA, 20 nt, Artificial Sequence
  source: /note="Description of Artificial Sequence: Synthetic oligonucleotide"
aucugggacgcccggaaucu

SEQ ID NO: 433 - RNA, 20 nt, Artificial Sequence
  source: /note="Description of Artificial Sequence: Synthetic oligonucleotide"
ucugggacgcccggaaucuu

SEQ ID NO: 434 - RNA, 20 nt, Artificial Sequence
  source: /note="Description of Artificial Sequence: Synthetic oligonucleotide"
gcccggaaucuugggagcuu

SEQ ID NO: 435 - RNA, 20 nt, Artificial Sequence
  source: /note="Description of Artificial Sequence: Synthetic oligonucleotide"
cccggaaucuugggagcuug

SEQ ID NO: 436 - RNA, 20 nt, Artificial Sequence
  source: /note="Description of Artificial Sequence: Synthetic oligonucleotide"
cauccugcuuuugagguucu

SEQ ID NO: 437 - RNA, 20 nt, Artificial Sequence
  source: /note="Description of Artificial Sequence: Synthetic oligonucleotide"
accucaaaagcaggaugccc

SEQ ID NO: 438 - RNA, 20 nt, Artificial Sequence
  source: /note="Description of Artificial Sequence: Synthetic oligonucleotide"
cuagcaugaccuagaggugu

SEQ ID NO: 439 - RNA, 20 nt, Artificial Sequence
  source: /note="Description of Artificial Sequence: Synthetic oligonucleotide"
ccuagcaugaccuagaggug

SEQ ID NO: 440 - RNA, 20 nt, Artificial Sequence
  source: /note="Description of Artificial Sequence: Synthetic oligonucleotide"
ccugcccuagcaugaccuag

SEQ ID NO: 441 - RNA, 20 nt, Artificial Sequence
  source: /note="Description of Artificial Sequence: Synthetic oligonucleotide"
ccacaccucuaggucaugcu

SEQ ID NO: 442 - RNA, 20 nt, Artificial Sequence
  source: /note="Description of Artificial Sequence: Synthetic oligonucleotide"
cacaccucuaggucaugcua

SEQ ID NO: 443 - RNA, 20 nt, Artificial Sequence
  source: /note="Description of Artificial Sequence: Synthetic oligonucleotide"
ccucuaggucaugcuagggc

SEQ ID NO: 444 - RNA, 20 nt, Artificial Sequence
  source: /note="Description of Artificial Sequence: Synthetic oligonucleotide"
ccuggcccagccaagaaaca

SEQ ID NO: 445 - RNA, 20 nt, Artificial Sequence
  source: /note="Description of Artificial Sequence: Synthetic oligonucleotide"
uggagagggcguucagaguu

SEQ ID NO: 446 - RNA, 20 nt, Artificial Sequence
  source: /note="Description of Artificial Sequence: Synthetic oligonucleotide"
gcaagggcugguuuuaggau

SEQ ID NO: 447 - RNA, 20 nt, Artificial Sequence
  source: /note="Description of Artificial Sequence: Synthetic oligonucleotide"
ugcaagggcugguuuuagga

SEQ ID NO: 448 - RNA, 20 nt, Artificial Sequence
  source: /note="Description of Artificial Sequence: Synthetic oligonucleotide"
ugggugcaagggcugguuuu

SEQ ID NO: 449 - RNA, 20 nt, Artificial Sequence
  source: /note="Description of Artificial Sequence: Synthetic oligonucleotide"
agagcugugccugggugcaa

SEQ ID NO: 450 - RNA, 20 nt, Artificial Sequence
  source: /note="Description of Artificial Sequence: Synthetic oligonucleotide"
uaaaaccagcccuugcaccc

SEQ ID NO: 451 - RNA, 20 nt, Artificial Sequence
  source: /note="Description of Artificial Sequence: Synthetic oligonucleotide"
accaaaguguccccuggagg

SEQ ID NO: 452 - RNA, 20 nt, Artificial Sequence
  source: /note="Description of Artificial Sequence: Synthetic oligonucleotide"
uuaccaaaguguccccugga

SEQ ID NO: 453 - RNA, 20 nt, Artificial Sequence
  source: /note="Description of Artificial Sequence: Synthetic oligonucleotide"
uuugcaucaucuacagcgca

SEQ ID NO: 454 - RNA, 20 nt, Artificial Sequence
  source: /note="Description of Artificial Sequence: Synthetic oligonucleotide"
ugugugaccucuggaagggg

SEQ ID NO: 455 - RNA, 20 nt, Artificial Sequence
  source: /note="Description of Artificial Sequence: Synthetic oligonucleotide"
aacagucacaacccuuuucu

SEQ ID NO: 456 - RNA, 20 nt, Artificial Sequence
  source: /note="Description of Artificial Sequence: Synthetic oligonucleotide"
acagucacaacccuuuucuu

SEQ ID NO: 457 - RNA, 20 nt, Artificial Sequence
  source: /note="Description of Artificial Sequence: Synthetic oligonucleotide"
gaccagaaagguguggucac

SEQ ID NO: 458 - RNA, 20 nt, Artificial Sequence
  source: /note="Description of Artificial Sequence: Synthetic oligonucleotide"
ggagaggguguugaccagaa

SEQ ID NO: 459 - RNA, 20 nt, Artificial Sequence
  source: /note="Description of Artificial Sequence: Synthetic oligonucleotide"
ucucaauuucucgggccaau

SEQ ID NO: 460 - RNA, 20 nt, Artificial Sequence
  source: /note="Description of Artificial Sequence: Synthetic oligonucleotide"
ccaaucccucaucauccaau

SEQ ID NO: 461 - RNA, 20 nt, Artificial Sequence
  source: /note="Description of Artificial Sequence: Synthetic oligonucleotide"
cucgggccaauuggaugaug

SEQ ID NO: 462 - RNA, 20 nt, Artificial Sequence
  source: /note="Description of Artificial Sequence: Synthetic oligonucleotide"
ucgggccaauuggaugauga

SEQ ID NO: 463 - RNA, 20 nt, Artificial Sequence
  source: /note="Description of Artificial Sequence: Synthetic oligonucleotide"
cccagcccuaucccuuuuuc

SEQ ID NO: 464 - RNA, 20 nt, Artificial Sequence
  source: /note="Description of Artificial Sequence: Synthetic oligonucleotide"
gauuagccucaauuugagga

SEQ ID NO: 465 - RNA, 20 nt, Artificial Sequence
  source: /note="Description of Artificial Sequence: Synthetic oligonucleotide"
guuggauuagccucaauuug

SEQ ID NO: 466 - RNA, 20 nt, Artificial Sequence
  source: /note="Description of Artificial Sequence: Synthetic oligonucleotide"
agcccgacagaugcaauugu

SEQ ID NO: 467 - RNA, 20 nt, Artificial Sequence
  source: /note="Description of Artificial Sequence: Synthetic oligonucleotide"
auccaacaauugcaucuguc

SEQ ID NO: 468 - RNA, 20 nt, Artificial Sequence
  source: /note="Description of Artificial Sequence: Synthetic oligonucleotide"
caauugcaucugucgggcuc

SEQ ID NO: 469 - RNA, 20 nt, Artificial Sequence
  source: /note="Description of Artificial Sequence: Synthetic oligonucleotide"
ugcaucugucgggcucugga

SEQ ID NO: 470 - RNA, 20 nt, Artificial Sequence
  source: /note="Description of Artificial Sequence: Synthetic oligonucleotide"
caucugucgggcucuggacg

SEQ ID NO: 471 - RNA, 20 nt, Artificial Sequence
  source: /note="Description of Artificial Sequence: Synthetic oligonucleotide"
uucccccaguguguuaaccu

SEQ ID NO: 472 - RNA, 20 nt, Artificial Sequence
  source: /note="Description of Artificial Sequence: Synthetic oligonucleotide"
caggccaauugcccgggcca

SEQ ID NO: 473 - RNA, 20 nt, Artificial Sequence
  source: /note="Description of Artificial Sequence: Synthetic oligonucleotide"
caguguguuaaccuuggccc

SEQ ID NO: 474 - RNA, 20 nt, Artificial Sequence
  source: /note="Description of Artificial Sequence: Synthetic oligonucleotide"
ggggagcaggccaauugccc

SEQ ID NO: 475 - RNA, 20 nt, Artificial Sequence
  source: /note="Description of Artificial Sequence: Synthetic oligonucleotide"
cggggagcaggccaauugcc

SEQ ID NO: 476 - RNA, 20 nt, Artificial Sequence
  source: /note="Description of Artificial Sequence: Synthetic oligonucleotide"
uuaaccuuggcccgggcaau

SEQ ID NO: 477 - RNA, 20 nt, Artificial Sequence
  source: /note="Description of Artificial Sequence: Synthetic oligonucleotide"
aagcuugccaaucggggagc

SEQ ID NO: 478 - RNA, 20 nt, Artificial Sequence
  source: /note="Description of Artificial Sequence: Synthetic oligonucleotide"
caauuggccugcuccccgau

SEQ ID NO: 479 - RNA, 20 nt, Artificial Sequence
  source: /note="Description of Artificial Sequence: Synthetic oligonucleotide"
guggguaagcuugccaaucg

SEQ ID NO: 480 - RNA, 20 nt, Artificial Sequence
  source: /note="Description of Artificial Sequence: Synthetic oligonucleotide"
cguggguaagcuugccaauc

SEQ ID NO: 481 - RNA, 20 nt, Artificial Sequence
  source: /note="Description of Artificial Sequence: Synthetic oligonucleotide"
acguggguaagcuugccaau

SEQ ID NO: 482 - RNA, 20 nt, Artificial Sequence
  source: /note="Description of Artificial Sequence: Synthetic oligonucleotide"
uuggcaagcuuacccacguc

SEQ ID NO: 483 - RNA, 20 nt, Artificial Sequence
  source: /note="Description of Artificial Sequence: Synthetic oligonucleotide"
ccgccacacuugccugacgu

SEQ ID NO: 484 - RNA, 20 nt, Artificial Sequence
  source: /note="Description of Artificial Sequence: Synthetic oligonucleotide"
cccgccacacuugccugacg

SEQ ID NO: 485 - RNA, 20 nt, Artificial Sequence
  source: /note="Description of Artificial Sequence: Synthetic oligonucleotide"
uuacccacgucaggcaagug

SEQ ID NO: 486 - RNA, 20 nt, Artificial Sequence
  source: /note="Description of Artificial Sequence: Synthetic oligonucleotide"
cccacgucaggcaagugugg

SEQ ID NO: 487 - RNA, 20 nt, Artificial Sequence
  source: /note="Description of Artificial Sequence: Synthetic oligonucleotide"
ccacgucaggcaaguguggc

SEQ ID NO: 488 - RNA, 20 nt, Artificial Sequence
  source: /note="Description of Artificial Sequence: Synthetic oligonucleotide"
uggagcgaccacaggaaucc

SEQ ID NO: 489 - RNA, 20 nt, Artificial Sequence
  source: /note="Description of Artificial Sequence: Synthetic oligonucleotide"
aggauuccuguggucgcucc

SEQ ID NO: 490 - RNA, 20 nt, Artificial Sequence
  source: /note="Description of Artificial Sequence: Synthetic oligonucleotide"
ccgccuguggagccaaugcc

SEQ ID NO: 491 - RNA, 20 nt, Artificial Sequence
  source: /note="Description of Artificial Sequence: Synthetic oligonucleotide"
gcuccaggcauuggcuccac

SEQ ID NO: 492 - RNA, 20 nt, Artificial Sequence
  source: /note="Description of Artificial Sequence: Synthetic oligonucleotide"
ccaggcauuggcuccacagg

SEQ ID NO: 493 - RNA, 20 nt, Artificial Sequence
  source: /note="Description of Artificial Sequence: Synthetic oligonucleotide"
aacucucuauuauccgccug

SEQ ID NO: 494 - RNA, 20 nt, Artificial Sequence
  source: /note="Description of Artificial Sequence: Synthetic oligonucleotide"
cugaaauccaauccccuccu

SEQ ID NO: 495 - RNA, 20 nt, Artificial Sequence
  source: /note="Description of Artificial Sequence: Synthetic oligonucleotide"
ccaggaggggauuggauuuc

SEQ ID NO: 496 - RNA, 20 nt, Artificial Sequence
  source: /note="Description of Artificial Sequence: Synthetic oligonucleotide"
ggaugggcucucugcagcuc

SEQ ID NO: 497 - RNA, 20 nt, Artificial Sequence
  source: /note="Description of Artificial Sequence: Synthetic oligonucleotide"
uccuugccagaugaugaacg

SEQ ID NO: 498 - RNA, 20 nt, Artificial Sequence
  source: /note="Description of Artificial Sequence: Synthetic oligonucleotide"
cacugcagcauucuagcacc

SEQ ID NO: 499 - RNA, 20 nt, Artificial Sequence
  source: /note="Description of Artificial Sequence: Synthetic oligonucleotide"
caguagaccagguacuuugu

SEQ ID NO: 500 - RNA, 20 nt, Artificial Sequence
  source: /note="Description of Artificial Sequence: Synthetic oligonucleotide"
gcauguagucacaguagacc

SEQ ID NO: 501 - RNA, 20 nt, Artificial Sequence
  source: /note="Description of Artificial Sequence: Synthetic oligonucleotide"
ucuugggaugacugcuugcu

SEQ ID NO: 502 - RNA, 20 nt, Artificial Sequence
  source: /note="Description of Artificial Sequence: Synthetic oligonucleotide"
uucuugggaugacugcuugc

SEQ ID NO: 503 - RNA, 20 nt, Artificial Sequence
  source: /note="Description of Artificial Sequence: Synthetic oligonucleotide"
uagaacuuucugaaaucacc

SEQ ID NO: 504 - RNA, 20 nt, Artificial Sequence
  source: /note="Description of Artificial Sequence: Synthetic oligonucleotide"
caagcccaccuaacucuuuu

SEQ ID NO: 505 - RNA, 20 nt, Artificial Sequence
  source: /note="Description of Artificial Sequence: Synthetic oligonucleotide"
ccaagcccaccuaacucuuu

SEQ ID NO: 506 - RNA, 20 nt, Artificial Sequence
  source: /note="Description of Artificial Sequence: Synthetic oligonucleotide"
cugacuguaugggccuccuc

SEQ ID NO: 507 - RNA, 20 nt, Artificial Sequence
  source: /note="Description of Artificial Sequence: Synthetic oligonucleotide"
ugccuccauucugacuguau

SEQ ID NO: 508 - RNA, 20 nt, Artificial Sequence
  source: /note="Description of Artificial Sequence: Synthetic oligonucleotide"
augccuccauucugacugua

SEQ ID NO: 509 - RNA, 20 nt, Artificial Sequence
  source: /note="Description of Artificial Sequence: Synthetic oligonucleotide"
gccaccuacaaggcccuaug

SEQ ID NO: 510 - RNA, 20 nt, Artificial Sequence
  source: /note="Description of Artificial Sequence: Synthetic oligonucleotide"
acucuuagccgccaccuaca

SEQ ID NO: 511 - RNA, 20 nt, Artificial Sequence
  source: /note="Description of Artificial Sequence: Synthetic oligonucleotide"
guuuuuuacaagccucaccc

SEQ ID NO: 512 - RNA, 20 nt, Artificial Sequence
  source: /note="Description of Artificial Sequence: Synthetic oligonucleotide"
gaguccccuuggcucuccug

SEQ ID NO: 513 - RNA, 20 nt, Artificial Sequence
  source: /note="Description of Artificial Sequence: Synthetic oligonucleotide"
ggggucccccaggagagcca

SEQ ID NO: 514 - RNA, 20 nt, Artificial Sequence
  source: /note="Description of Artificial Sequence: Synthetic oligonucleotide"
ggucccccaggagagccaag

SEQ ID NO: 515 - RNA, 20 nt, Artificial Sequence
  source: /note="Description of Artificial Sequence: Synthetic oligonucleotide"
agcccugaaagggguuucuu

SEQ ID NO: 516 - RNA, 20 nt, Artificial Sequence
  source: /note="Description of Artificial Sequence: Synthetic oligonucleotide"
cuuccaaagaaaccccuuuc

SEQ ID NO: 517 - RNA, 20 nt, Artificial Sequence
  source: /note="Description of Artificial Sequence: Synthetic oligonucleotide"
gugguccugagcccugaaag

SEQ ID NO: 518 - RNA, 20 nt, Artificial Sequence
  source: /note="Description of Artificial Sequence: Synthetic oligonucleotide"
uucagggcucaggaccacag

SEQ ID NO: 519 - RNA, 20 nt, Artificial Sequence
  source: /note="Description of Artificial Sequence: Synthetic oligonucleotide"
acagaggccacgggccucuc

SEQ ID NO: 520 - RNA, 20 nt, Artificial Sequence
  source: /note="Description of Artificial Sequence: Synthetic oligonucleotide"
gugccucagaaaggcccugc

SEQ ID NO: 521 - RNA, 20 nt, Artificial Sequence
  source: /note="Description of Artificial Sequence: Synthetic oligonucleotide"
gaggggagacccugaggggc

SEQ ID NO: 522 - RNA, 20 nt, Artificial Sequence
  source: /note="Description of Artificial Sequence: Synthetic oligonucleotide"
ugcccgucugcaacagagag

SEQ ID NO: 523 - RNA, 20 nt, Artificial Sequence
  source: /note="Description of Artificial Sequence: Synthetic oligonucleotide"
cugcccgucugcaacagaga

SEQ ID NO: 524 - RNA, 20 nt, Artificial Sequence
  source: /note="Description of Artificial Sequence: Synthetic oligonucleotide"
gcagacgggcagccccaucc

SEQ ID NO: 525 - RNA, 20 nt, Artificial Sequence
  source: /note="Description of Artificial Sequence: Synthetic oligonucleotide"
gcuucgcugaggccgggaug

SEQ ID NO: 526 - RNA, 20 nt, Artificial Sequence
  source: /note="Description of Artificial Sequence: Synthetic oligonucleotide"
uggcggaggugacacggggg

SEQ ID NO: 527 - RNA, 20 nt, Artificial Sequence
  source: /note="Description of Artificial Sequence: Synthetic oligonucleotide"
ggguggcggaggugacacgg

SEQ ID NO: 528 - RNA, 20 nt, Artificial Sequence
  source: /note="Description of Artificial Sequence: Synthetic oligonucleotide"
uggguggcggaggugacacg

SEQ ID NO: 529 - RNA, 20 nt, Artificial Sequence
  source: /note="Description of Artificial Sequence: Synthetic oligonucleotide"
gcugauccgauggguggcgg

SEQ ID NO: 530 - RNA, 20 nt, Artificial Sequence
  source: /note="Description of Artificial Sequence: Synthetic oligonucleotide"
gugucaccuccgccacccau

SEQ ID NO: 531 - RNA, 20 nt, Artificial Sequence
  source: /note="Description of Artificial Sequence: Synthetic oligonucleotide"
ucaccagcugcugauccgau

SEQ ID NO: 532 - RNA, 20 nt, Artificial Sequence
  source: /note="Description of Artificial Sequence: Synthetic oligonucleotide"
ccacccaucggaucagcagc

SEQ ID NO: 533 - RNA, 20 nt, Artificial Sequence
  source: /note="Description of Artificial Sequence: Synthetic oligonucleotide"
auuccccaggggcuuaucug

SEQ ID NO: 534 - RNA, 20 nt, Artificial Sequence
  source: /note="Description of Artificial Sequence: Synthetic oligonucleotide"
cgcccaggggcuugccugcc

SEQ ID NO: 535 - RNA, 20 nt, Artificial Sequence
  source: /note="Description of Artificial Sequence: Synthetic oligonucleotide"
cucccggcaggcaagccccu

SEQ ID NO: 536 - RNA, 20 nt, Artificial Sequence
  source: /note="Description of Artificial Sequence: Synthetic oligonucleotide"
caaccccagcacacgcccag

SEQ ID NO: 537 - RNA, 20 nt, Artificial Sequence
  source: /note="Description of Artificial Sequence: Synthetic oligonucleotide"
ccaaccccagcacacgccca

SEQ ID NO: 538 - RNA, 20 nt, Artificial Sequence
  source: /note="Description of Artificial Sequence: Synthetic oligonucleotide"
aggucuggaaugaacacaga

SEQ ID NO: 539 - RNA, 20 nt, Artificial Sequence
  source: /note="Description of Artificial Sequence: Synthetic oligonucleotide"
caacucucauuaucccugcc

SEQ ID NO: 540 - RNA, 20 nt, Artificial Sequence
  source: /note="Description of Artificial Sequence: Synthetic oligonucleotide"
acuugaaggguccaacaucc

SEQ ID NO: 541 - RNA, 20 nt, Artificial Sequence
  source: /note="Description of Artificial Sequence: Synthetic oligonucleotide"
guaucauucuaagggucacc

SEQ ID NO: 542 - RNA, 20 nt, Artificial Sequence
  source: /note="Description of Artificial Sequence: Synthetic oligonucleotide"
gaggccuaguaucauucuaa

SEQ ID NO: 543 - RNA, 20 nt, Artificial Sequence
  source: /note="Description of Artificial Sequence: Synthetic oligonucleotide"
agaggccuaguaucauucua

SEQ ID NO: 544 - RNA, 20 nt, Artificial Sequence
  source: /note="Description of Artificial Sequence: Synthetic oligonucleotide"
aauucaugagaugcaucuua

SEQ ID NO: 545 - RNA, 20 nt, Artificial Sequence
  source: /note="Description of Artificial Sequence: Synthetic oligonucleotide"
caagccauuuaauaaagagu

SEQ ID NO: 546 - RNA, 20 nt, Artificial Sequence
  source: /note="Description of Artificial Sequence: Synthetic oligonucleotide"
ggucccuacucuuuauuaaa

SEQ ID NO: 547 - RNA, 20 nt, Artificial Sequence
  source: /note="Description of Artificial Sequence: Synthetic oligonucleotide"
cugauaaacuuacuaugacc

SEQ ID NO: 548 - RNA, 20 nt, Artificial Sequence
  source: /note="Description of Artificial Sequence: Synthetic oligonucleotide"
cuaaaaggaccauccuccug

SEQ ID NO: 549 - RNA, 20 nt, Artificial Sequence
  source: /note="Description of Artificial Sequence: Synthetic oligonucleotide"
acuaaaaggaccauccuccu

SEQ ID NO: 550 - RNA, 20 nt, Artificial Sequence
  source: /note="Description of Artificial Sequence: Synthetic oligonucleotide"
uacuaaaaggaccauccucc

SEQ ID NO: 551 - RNA, 20 nt, Artificial Sequence
  source: /note="Description of Artificial Sequence: Synthetic oligonucleotide"
cacugacaugcgauacuaaa

SEQ ID NO: 552 - RNA, 20 nt, Artificial Sequence
  source: /note="Description of Artificial Sequence: Synthetic oligonucleotide"
gaaauguuccauucagaugu

SEQ ID NO: 553 - RNA, 20 nt, Artificial Sequence
  source: /note="Description of Artificial Sequence: Synthetic oligonucleotide"
gucuccacccaacaucugaa

SEQ ID NO: 554 - RNA, 20 nt, Artificial Sequence
  source: /note="Description of Artificial Sequence: Synthetic oligonucleotide"
ucacgcuuauggaacagaug

SEQ ID NO: 555 - RNA, 20 nt, Artificial Sequence
  source: /note="Description of Artificial Sequence: Synthetic oligonucleotide"
ggggaugccaaucacgcuua

SEQ ID NO: 556 - RNA, 20 nt, Artificial Sequence
  source: /note="Description of Artificial Sequence: Synthetic oligonucleotide"
aucuguuccauaagcgugau

SEQ ID NO: 557 - RNA, 20 nt, Artificial Sequence
  source: /note="Description of Artificial Sequence: Synthetic oligonucleotide"
gcgugauuggcauccccuga

SEQ ID NO: 558 - RNA, 20 nt, Artificial Sequence
  source: /note="Description of Artificial Sequence: Synthetic oligonucleotide"
uggcauccccugauggaggc

SEQ ID NO: 559 - RNA, 20 nt, Artificial Sequence
  source: /note="Description of Artificial Sequence: Synthetic oligonucleotide"
uuauuaugaccauuugagau

SEQ ID NO: 560 - RNA, 20 nt, Artificial Sequence
  source: /note="Description of Artificial Sequence: Synthetic oligonucleotide"
aagggagaaccgaucucaaa

SEQ ID NO: 561 - RNA, 20 nt, Artificial Sequence
  source: /note="Description of Artificial Sequence: Synthetic oligonucleotide"
gucauaauaagaacccacac

SEQ ID NO: 562 - RNA, 20 nt, Artificial Sequence
  source: /note="Description of Artificial Sequence: Synthetic oligonucleotide"
caaugaccccgcagggugua

SEQ ID NO: 563 - RNA, 20 nt, Artificial Sequence
  source: /note="Description of Artificial Sequence: Synthetic oligonucleotide"
ucaaugaccccgcagggugu

SEQ ID NO: 564 - RNA, 20 nt, Artificial Sequence
  source: /note="Description of Artificial Sequence: Synthetic oligonucleotide"
ucuucacccuacacccugcg

SEQ ID NO: 565 - RNA, 20 nt, Artificial Sequence
  source: /note="Description of Artificial Sequence: Synthetic oligonucleotide"
aaccuuucaaugaccccgca

SEQ ID NO: 566 - RNA, 20 nt, Artificial Sequence
  source: /note="Description of Artificial Sequence: Synthetic oligonucleotide"
caaccuuucaaugaccccgc

SEQ ID NO: 567 - RNA, 20 nt, Artificial Sequence
  source: /note="Description of Artificial Sequence: Synthetic oligonucleotide"
cacccugcggggucauugaa

SEQ ID NO: 568 - RNA, 20 nt, Artificial Sequence
  source: /note="Description of Artificial Sequence: Synthetic oligonucleotide"
caaaaggugcuugcaacaca

SEQ ID NO: 569 - RNA, 20 nt, Artificial Sequence
  source: /note="Description of Artificial Sequence: Synthetic oligonucleotide"
caagcaccuuuuguugauga

SEQ ID NO: 570 - RNA, 20 nt, Artificial Sequence
  source: /note="Description of Artificial Sequence: Synthetic oligonucleotide"
uuguccuuauacaacaucug

SEQ ID NO: 571 - RNA, 20 nt, Artificial Sequence
  source: /note="Description of Artificial Sequence: Synthetic oligonucleotide"
agcuccacagauguuguaua

SEQ ID NO: 572 - RNA, 20 nt, Artificial Sequence
  source: /note="Description of Artificial Sequence: Synthetic oligonucleotide"
gauguuguauaaggacaaag

SEQ ID NO: 573 - RNA, 20 nt, Artificial Sequence
  source: /note="Description of Artificial Sequence: Synthetic oligonucleotide"
acaaagggguucccaguucu

SEQ ID NO: 574 - RNA, 20 nt, Artificial Sequence
  source: /note="Description of Artificial Sequence: Synthetic oligonucleotide"
caaagggguucccaguucuu

SEQ ID NO: 575 - RNA, 20 nt, Artificial Sequence
  source: /note="Description of Artificial Sequence: Synthetic oligonucleotide"
uggggguaauucccaagaac

SEQ ID NO: 576 - RNA, 20 nt, Artificial Sequence
  source: /note="Description of Artificial Sequence: Synthetic oligonucleotide"
gaccuucuugggcagagggg

SEQ ID NO: 577 - RNA, 20 nt, Artificial Sequence
  source: /note="Description of Artificial Sequence: Synthetic oligonucleotide"
ccugaccuucuugggcagag

SEQ ID NO: 578 - RNA, 20 nt, Artificial Sequence
  source: /note="Description of Artificial Sequence: Synthetic oligonucleotide"
uccugaccuucuugggcaga

SEQ ID NO: 579 - RNA, 20 nt, Artificial Sequence
  source: /note="Description of Artificial Sequence: Synthetic oligonucleotide"
cccagugauccugaccuucu

SEQ ID NO: 580 - RNA, 20 nt, Artificial Sequence
  source: /note="Description of Artificial Sequence: Synthetic oligonucleotide"
ccccucugcccaagaagguc

SEQ ID NO: 581 - RNA, 20 nt, Artificial Sequence
  source: /note="Description of Artificial Sequence: Synthetic oligonucleotide"
cccaagaaggucaggaucac

SEQ ID NO: 582 - RNA, 20 nt, Artificial Sequence
  source: /note="Description of Artificial Sequence: Synthetic oligonucleotide"
ccaagaaggucaggaucacu

SEQ ID NO: 583 - RNA, 20 nt, Artificial Sequence
  source: /note="Description of Artificial Sequence: Synthetic oligonucleotide"
gucaggaucacuggggccaa

SEQ ID NO: 584 - RNA, 20 nt, Artificial Sequence
  source: /note="Description of Artificial Sequence: Synthetic oligonucleotide"
acuggggccaaaggcuuagc

SEQ ID NO: 585 - RNA, 20 nt, Artificial Sequence
  source: /note="Description of Artificial Sequence: Synthetic oligonucleotide"
cuuucuggagggggagaugc

SEQ ID NO: 586 - RNA, 20 nt, Artificial Sequence
  source: /note="Description of Artificial Sequence: Synthetic oligonucleotide"
agauuuggcgauuaacuuug

SEQ ID NO: 587 - RNA, 20 nt, Artificial Sequence
  source: /note="Description of Artificial Sequence: Synthetic oligonucleotide"
acaaaguuaaucgccaaauc

SEQ ID NO: 588 - RNA, 20 nt, Artificial Sequence
  source: /note="Description of Artificial Sequence: Synthetic oligonucleotide"
caaaguuaaucgccaaaucu

SEQ ID NO: 589 - RNA, 20 nt, Artificial Sequence
  source: /note="Description of Artificial Sequence: Synthetic oligonucleotide"
aaaguuaaucgccaaaucug

SEQ ID NO: 590 - RNA, 20 nt, Artificial Sequence
  source: /note="Description of Artificial Sequence: Synthetic oligonucleotide"
aaguuaaucgccaaaucugg

SEQ ID NO: 591 - RNA, 20 nt, Artificial Sequence
  source: /note="Description of Artificial Sequence: Synthetic oligonucleotide"
aaucgccaaaucugggggag

SEQ ID NO: 592 - RNA, 20 nt, Artificial Sequence
  source: /note="Description of Artificial Sequence: Synthetic oligonucleotide"
uuagcaaaaucaccccaguu

SEQ ID NO: 593 - RNA, 20 nt, Artificial Sequence
  source: /note="Description of Artificial Sequence: Synthetic oligonucleotide"
uagcaaaaucaccccaguuu

SEQ ID NO: 594 - RNA, 20 nt, Artificial Sequence
  source: /note="Description of Artificial Sequence: Synthetic oligonucleotide"
gucuugguucuccccaaacu

SEQ ID NO: 595 - RNA, 20 nt, Artificial Sequence
  source: /note="Description of Artificial Sequence: Synthetic oligonucleotide"
ugucuugguucuccccaaac

SEQ ID NO: 596 - RNA, 20 nt, Artificial Sequence
  source: /note="Description of Artificial Sequence: Synthetic oligonucleotide"
aagccucucaucugugcucc

SEQ ID NO: 597 - RNA, 20 nt, Artificial Sequence
  source: /note="Description of Artificial Sequence: Synthetic oligonucleotide"
gccaccucuaagaagucugg

SEQ ID NO: 598 - RNA, 20 nt, Artificial Sequence
  source: /note="Description of Artificial Sequence: Synthetic oligonucleotide"
ccacauccccguguggccca

SEQ ID NO: 599 - RNA, 20 nt, Artificial Sequence
  source: /note="Description of Artificial Sequence: Synthetic oligonucleotide"
cacauccccguguggcccag

SEQ ID NO: 600 - RNA, 20 nt, Artificial Sequence
  source: /note="Description of Artificial Sequence: Synthetic oligonucleotide"
aauguacggagaccaccccu

SEQ ID NO: 601 - RNA, 20 nt, Artificial Sequence
  source: /note="Description of Artificial Sequence: Synthetic oligonucleotide"
gaauguacggagaccacccc

SEQ ID NO: 602 - RNA, 20 nt, Artificial Sequence
  source: /note="Description of Artificial Sequence: Synthetic oligonucleotide"
cuagccccgcugcauugugg

SEQ ID NO: 603 - RNA, 20 nt, Artificial Sequence
  source: /note="Description of Artificial Sequence: Synthetic oligonucleotide"
ccuagccccgcugcauugug

SEQ ID NO: 604 - RNA, 20 nt, Artificial Sequence
  source: /note="Description of Artificial Sequence: Synthetic oligonucleotide"
gccuagccccgcugcauugu

SEQ ID NO: 605 - RNA, 20 nt, Artificial Sequence
  source: /note="Description of Artificial Sequence: Synthetic oligonucleotide"
agccuagccccgcugcauug

SEQ ID NO: 606 - RNA, 20 nt, Artificial Sequence
  source: /note="Description of Artificial Sequence: Synthetic oligonucleotide"
acauucccccacaaugcagc

SEQ ID NO: 607 - RNA, 20 nt, Artificial Sequence
  source: /note="Description of Artificial Sequence: Synthetic oligonucleotide"
ugcagcggggcuaggcuuug

SEQ ID NO: 608 - RNA, 20 nt, Artificial Sequence
  source: /note="Description of Artificial Sequence: Synthetic oligonucleotide"
ugcauccuaggaguugaacc

SEQ ID NO: 609 - RNA, 20 nt, Artificial Sequence
  source: /note="Description of Artificial Sequence: Synthetic oligonucleotide"
gaccuaucgggucaaaagcc

SEQ ID NO: 610 - RNA, 20 nt, Artificial Sequence
  source: /note="Description of Artificial Sequence: Synthetic oligonucleotide"
aaccuggcuuuugacccgau

SEQ ID NO: 611 - RNA, 20 nt, Artificial Sequence
  source: /note="Description of Artificial Sequence: Synthetic oligonucleotide"
uggauccuuccggaccuauc

SEQ ID NO: 612 - RNA, 20 nt, Artificial Sequence
  source: /note="Description of Artificial Sequence: Synthetic oligonucleotide"
guggauccuuccggaccuau

SEQ ID NO: 613 - RNA, 20 nt, Artificial Sequence
  source: /note="Description of Artificial Sequence: Synthetic oligonucleotide"
ggcuuuugacccgauagguc

SEQ ID NO: 614 - RNA, 20 nt, Artificial Sequence
  source: /note="Description of Artificial Sequence: Synthetic oligonucleotide"
uuugacccgauagguccgga

SEQ ID NO: 615 - RNA, 20 nt, Artificial Sequence
  source: /note="Description of Artificial Sequence: Synthetic oligonucleotide"
ggaguccacguggauccuuc

SEQ ID NO: 616 - RNA, 20 nt, Artificial Sequence
  source: /note="Description of Artificial Sequence: Synthetic oligonucleotide"
uagguccggaaggauccacg

SEQ ID NO: 617 - RNA, 20 nt, Artificial Sequence
  source: /note="Description of Artificial Sequence: Synthetic oligonucleotide"
cccgagggugacaggggugu

SEQ ID NO: 618 - RNA, 20 nt, Artificial Sequence
  source: /note="Description of Artificial Sequence: Synthetic oligonucleotide"
auccagcccgagggugacag

SEQ ID NO: 619 - RNA, 20 nt, Artificial Sequence
  source: /note="Description of Artificial Sequence: Synthetic oligonucleotide"
gauccagcccgagggugaca

SEQ ID NO: 620 - RNA, 20 nt, Artificial Sequence
  source: /note="Description of Artificial Sequence: Synthetic oligonucleotide"
agauccagcccgagggugac

SEQ ID NO: 621 - RNA, 20 nt, Artificial Sequence
  source: /note="Description of Artificial Sequence: Synthetic oligonucleotide"
gccccggagauccagcccga

SEQ ID NO: 622 - RNA, 20 nt, Artificial Sequence
  source: /note="Description of Artificial Sequence: Synthetic oligonucleotide"
ggccccggagauccagcccg

SEQ ID NO: 623 - RNA, 20 nt, Artificial Sequence
  source: /note="Description of Artificial Sequence: Synthetic oligonucleotide"
aggccguuugaagcaggccc

SEQ ID NO: 624 - RNA, 20 nt, Artificial Sequence
  source: /note="Description of Artificial Sequence: Synthetic oligonucleotide"
ccucccaggccguuugaagc

SEQ ID NO: 625 - RNA, 20 nt, Artificial Sequence
  source: /note="Description of Artificial Sequence: Synthetic oligonucleotide"
ucuccggggccugcuucaaa

SEQ ID NO: 626 - RNA, 20 nt, Artificial Sequence
  source: /note="Description of Artificial Sequence: Synthetic oligonucleotide"
ggggccugcuucaaacggcc

SEQ ID NO: 627 - RNA, 20 nt, Artificial Sequence
  source: /note="Description of Artificial Sequence: Synthetic oligonucleotide"
gggccugcuucaaacggccu

SEQ ID NO: 628 - RNA, 20 nt, Artificial Sequence
  source: /note="Description of Artificial Sequence: Synthetic oligonucleotide"
ccugcuucaaacggccuggg

SEQ ID NO: 629 - RNA, 20 nt, Artificial Sequence
  source: /note="Description of Artificial Sequence: Synthetic oligonucleotide"
guggugauggggguccuccc

SEQ ID NO: 630 - RNA, 20 nt, Artificial Sequence
  source: /note="Description of Artificial Sequence: Synthetic oligonucleotide"
uuccuuccuaggguggugau

SEQ ID NO: 631 - RNA, 20 nt, Artificial Sequence
  source: /note="Description of Artificial Sequence: Synthetic oligonucleotide"
uuuccuuccuagggugguga

SEQ ID NO: 632 - RNA, 20 nt, Artificial Sequence
  source: /note="Description of Artificial Sequence: Synthetic oligonucleotide"
cccccaucaccacccuagga

SEQ ID NO: 633 - RNA, 20 nt, Artificial Sequence
  source: /note="Description of Artificial Sequence: Synthetic oligonucleotide"
aauggggacagguuagccau

SEQ ID NO: 634 - RNA, 20 nt, Artificial Sequence
  source: /note="Description of Artificial Sequence: Synthetic oligonucleotide"
cauggcuaaccuguccccau

SEQ ID NO: 635 - RNA, 20 nt, Artificial Sequence
  source: /note="Description of Artificial Sequence: Synthetic oligonucleotide"
gcugcaaggaagugccaaug

SEQ ID NO: 636 - RNA, 20 nt, Artificial Sequence
  source: /note="Description of Artificial Sequence: Synthetic oligonucleotide"
agcugcaaggaagugccaau

SEQ ID NO: 637 - RNA, 20 nt, Artificial Sequence
  source: /note="Description of Artificial Sequence: Synthetic oligonucleotide"
ggcacuuccuugcagcugcu

SEQ ID NO: 638 - RNA, 20 nt, Artificial Sequence
  source: /note="Description of Artificial Sequence: Synthetic oligonucleotide"
ggcagccuggacuuccggcc

SEQ ID NO: 639 - RNA, 20 nt, Artificial Sequence
  source: /note="Description of Artificial Sequence: Synthetic oligonucleotide"
ggguaccugggaaauggccc

SEQ ID NO: 640 - RNA, 20 nt, Artificial Sequence
  source: /note="Description of Artificial Sequence: Synthetic oligonucleotide"
cccggccaucagggguaccu

SEQ ID NO: 641 - RNA, 20 nt, Artificial Sequence
  source: /note="Description of Artificial Sequence: Synthetic oligonucleotide"
cagguaccccugauggccgg

SEQ ID NO: 642 - RNA, 20 nt, Artificial Sequence
  source: /note="Description of Artificial Sequence: Synthetic oligonucleotide"
cugggagcacccccuugucc

SEQ ID NO: 643 - RNA, 20 nt, Artificial Sequence
  source: /note="Description of Artificial Sequence: Synthetic oligonucleotide"
ggagcacccccuuguccagg

SEQ ID NO: 644 - RNA, 20 nt, Artificial Sequence
  source: /note="Description of Artificial Sequence: Synthetic oligonucleotide"
ccucgaaucuccgcucagau

SEQ ID NO: 645 - RNA, 20 nt, Artificial Sequence
  source: /note="Description of Artificial Sequence: Synthetic oligonucleotide"
ccuaucugagcggagauucg

SEQ ID NO: 646 - RNA, 20 nt, Artificial Sequence
  source: /note="Description of Artificial Sequence: Synthetic oligonucleotide"
uagcucagcgugggguuuca

SEQ ID NO: 647 - RNA, 20 nt, Artificial Sequence
  source: /note="Description of Artificial Sequence: Synthetic oligonucleotide"
gaaaccccacgcugagcuag

SEQ ID NO: 648 - RNA, 20 nt, Artificial Sequence
  source: /note="Description of Artificial Sequence: Synthetic oligonucleotide"
aaaccccacgcugagcuaga

SEQ ID NO: 649 - RNA, 20 nt, Artificial Sequence
  source: /note="Description of Artificial Sequence: Synthetic oligonucleotide"
cugagcuagagggcucuaga

SEQ ID NO: 650 - RNA, 20 nt, Artificial Sequence
  source: /note="Description of Artificial Sequence: Synthetic oligonucleotide"
cuagaagguucuuacaccac

SEQ ID NO: 651 - RNA, 20 nt, Artificial Sequence
  source: /note="Description of Artificial Sequence: Synthetic oligonucleotide"
uagaagguucuuacaccacc

SEQ ID NO: 652 - RNA, 20 nt, Artificial Sequence
  source: /note="Description of Artificial Sequence: Synthetic oligonucleotide"
agaagguucuuacaccaccg

SEQ ID NO: 653 - RNA, 20 nt, Artificial Sequence
  source: /note="Description of Artificial Sequence: Synthetic oligonucleotide"
gaagguucuuacaccaccgg

SEQ ID NO: 654 - RNA, 20 nt, Artificial Sequence
  source: /note="Description of Artificial Sequence: Synthetic oligonucleotide"
aagguucuuacaccaccggg

SEQ ID NO: 655 - RNA, 20 nt, Artificial Sequence
  source: /note="Description of Artificial Sequence: Synthetic oligonucleotide"
cuuuuggagaaacaugccca

SEQ ID NO: 656 - RNA, 20 nt, Artificial Sequence
  source: /note="Description of Artificial Sequence: Synthetic oligonucleotide"
gucgaaccuggggcggcccu

SEQ ID NO: 657 - RNA, 20 nt, Artificial Sequence
  source: /note="Description of Artificial Sequence: Synthetic oligonucleotide"
agucgaaccuggggcggccc

SEQ ID NO: 658 - RNA, 20 nt, Artificial Sequence
  source: /note="Description of Artificial Sequence: Synthetic oligonucleotide"
aacaugcccagggccgcccc

SEQ ID NO: 659 - RNA, 20 nt, Artificial Sequence
  source: /note="Description of Artificial Sequence: Synthetic oligonucleotide"
ggagccagucgaaccugggg

SEQ ID NO: 660 - RNA, 20 nt, Artificial Sequence
  source: /note="Description of Artificial Sequence: Synthetic oligonucleotide"
cuuggagccagucgaaccug

SEQ ID NO: 661 - RNA, 20 nt, Artificial Sequence
  source: /note="Description of Artificial Sequence: Synthetic oligonucleotide"
ucuuggagccagucgaaccu

SEQ ID NO: 662 - RNA, 20 nt, Artificial Sequence
  source: /note="Description of Artificial Sequence: Synthetic oligonucleotide"
agggccgccccagguucgac

SEQ ID NO: 663 - RNA, 20 nt, Artificial Sequence
  source: /note="Description of Artificial Sequence: Synthetic oligonucleotide"
guucgacuggcuccaagaug

SEQ ID NO: 664 - RNA, 20 nt, Artificial Sequence
  source: /note="Description of Artificial Sequence: Synthetic oligonucleotide"
aucccugcucguccucaucu

SEQ ID NO: 665 - RNA, 20 nt, Artificial Sequence
  source: /note="Description of Artificial Sequence: Synthetic oligonucleotide"
gcuccaagaugaggacgagc

SEQ ID NO: 666 - RNA, 20 nt, Artificial Sequence
  source: /note="Description of Artificial Sequence: Synthetic oligonucleotide"
ggacgagcagggaucccccc

SEQ ID NO: 667 - RNA, 20 nt, Artificial Sequence
  source: /note="Description of Artificial Sequence: Synthetic oligonucleotide"
aagugcagcccugcguccug

SEQ ID NO: 668 - RNA, 20 nt, Artificial Sequence
  source: /note="Description of Artificial Sequence: Synthetic oligonucleotide"
caagugcagcccugcguccu

SEQ ID NO: 669 - RNA, 20 nt, Artificial Sequence
  source: /note="Description of Artificial Sequence: Synthetic oligonucleotide"
agggauccccccaggacgca

SEQ ID NO: 670 - RNA, 20 nt, Artificial Sequence
  source: /note="Description of Artificial Sequence: Synthetic oligonucleotide"
ccaggacgcagggcugcacu

SEQ ID NO: 671 - RNA, 20 nt, Artificial Sequence
  source: /note="Description of Artificial Sequence: Synthetic oligonucleotide"
cuccugaagggggcgagggg

SEQ ID NO: 672 - RNA, 20 nt, Artificial Sequence
  source: /note="Description of Artificial Sequence: Synthetic oligonucleotide"
acacccuccugaagggggcg

SEQ ID NO: 673 - RNA, 20 nt, Artificial Sequence
  source: /note="Description of Artificial Sequence: Synthetic oligonucleotide"
gcacaaacacccuccugaag

SEQ ID NO: 674 - RNA, 20 nt, Artificial Sequence
  source: /note="Description of Artificial Sequence: Synthetic oligonucleotide"
ggcacaaacacccuccugaa

SEQ ID NO: 675 - RNA, 20 nt, Artificial Sequence
  source: /note="Description of Artificial Sequence: Synthetic oligonucleotide"
accccucgcccccuucagga

SEQ ID NO: 676 - RNA, 20 nt, Artificial Sequence
  source: /note="Description of Artificial Sequence: Synthetic oligonucleotide"
caggaggguguuugugccag

SEQ ID NO: 677 - RNA, 20 nt, Artificial Sequence
  source: /note="Description of Artificial Sequence: Synthetic oligonucleotide"
gucuucggggugucuuccac

SEQ ID NO: 678 - RNA, 20 nt, Artificial Sequence
  source: /note="Description of Artificial Sequence: Synthetic oligonucleotide"
cgccauguccagcgucuucg

SEQ ID NO: 679 - RNA, 20 nt, Artificial Sequence
  source: /note="Description of Artificial Sequence: Synthetic oligonucleotide"
ccgccauguccagcgucuuc

SEQ ID NO: 680 - RNA, 20 nt, Artificial Sequence
  source: /note="Description of Artificial Sequence: Synthetic oligonucleotide"
accgccauguccagcgucuu

SEQ ID NO: 681 - RNA, 20 nt, Artificial Sequence
  source: /note="Description of Artificial Sequence: Synthetic oligonucleotide"
ggaagacaccccgaagacgc

SEQ ID NO: 682 - RNA, 20 nt, Artificial Sequence
  source: /note="Description of Artificial Sequence: Synthetic oligonucleotide"
caccccgaagacgcuggaca

SEQ ID NO: 683 - RNA, 20 nt, Artificial Sequence
  source: /note="Description of Artificial Sequence: Synthetic oligonucleotide"
cccgaagacgcuggacaugg

SEQ ID NO: 684 - RNA, 20 nt, Artificial Sequence
  source: /note="Description of Artificial Sequence: Synthetic oligonucleotide"
gaagacgcuggacauggcgg

SEQ ID NO: 685 - RNA, 20 nt, Artificial Sequence
  source: /note="Description of Artificial Sequence: Synthetic oligonucleotide"
gacgcuggacauggcggugg

SEQ ID NO: 686 - RNA, 20 nt, Artificial Sequence
  source: /note="Description of Artificial Sequence: Synthetic oligonucleotide"
acgcuggacauggcgguggu

SEQ ID NO: 687 - RNA, 20 nt, Artificial Sequence
  source: /note="Description of Artificial Sequence: Synthetic oligonucleotide"
uaggccccacucggacggcu

SEQ ID NO: 688 - RNA, 20 nt, Artificial Sequence
  source: /note="Description of Artificial Sequence: Synthetic oligonucleotide"
guaggccccacucggacggc

SEQ ID NO: 689 - RNA, 20 nt, Artificial Sequence
  source: /note="Description of Artificial Sequence: Synthetic oligonucleotide"
ggcuggcccagccguccgag

SEQ ID NO: 690 - RNA, 20 nt, Artificial Sequence
  source: /note="Description of Artificial Sequence: Synthetic oligonucleotide"
guggguaggccccacucgga

SEQ ID NO: 691 - RNA, 20 nt, Artificial Sequence
  source: /note="Description of Artificial Sequence: Synthetic oligonucleotide"
gcuggcccagccguccgagu

SEQ ID NO: 692 - RNA, 20 nt, Artificial Sequence
  source: /note="Description of Artificial Sequence: Synthetic oligonucleotide"
cuggcccagccguccgagug

SEQ ID NO: 693 - RNA, 20 nt, Artificial Sequence
  source: /note="Description of Artificial Sequence: Synthetic oligonucleotide"
ugacguggguaggccccacu

SEQ ID NO: 694 - RNA, 20 nt, Artificial Sequence
  source: /note="Description of Artificial Sequence: Synthetic oligonucleotide"
ccuccgaggcugacgugggu

SEQ ID NO: 695 - RNA, 20 nt, Artificial Sequence
  source: /note="Description of Artificial Sequence: Synthetic oligonucleotide"
ggcuaccuccgaggcugacg

SEQ ID NO: 696 - RNA, 20 nt, Artificial Sequence
  source: /note="Description of Artificial Sequence: Synthetic oligonucleotide"
ccuacccacgucagccucgg

SEQ ID NO: 697 - RNA, 20 nt, Artificial Sequence
  source: /note="Description of Artificial Sequence: Synthetic oligonucleotide"
ggucuguguggcuaccuccg

SEQ ID NO: 698 - RNA, 20 nt, Artificial Sequence
  source: /note="Description of Artificial Sequence: Synthetic oligonucleotide"
cggagguagccacacagacc

SEQ ID NO: 699 - RNA, 20 nt, Artificial Sequence
  source: /note="Description of Artificial Sequence: Synthetic oligonucleotide"
agccuccgaguucacugucc

SEQ ID NO: 700 - RNA, 20 nt, Artificial Sequence
  source: /note="Description of Artificial Sequence: Synthetic oligonucleotide"
agugaacucggaggcuucug

SEQ ID NO: 701 - RNA, 20 nt, Artificial Sequence
  source: /note="Description of Artificial Sequence: Synthetic oligonucleotide"
acucggaggcuucuguggag

SEQ ID NO: 702 - RNA, 20 nt, Artificial Sequence
  source: /note="Description of Artificial Sequence: Synthetic oligonucleotide"
guccggaucgggggcaguag

SEQ ID NO: 703 - RNA, 20 nt, Artificial Sequence
  source: /note="Description of Artificial Sequence: Synthetic oligonucleotide"
agccgcuacugcccccgauc

SEQ ID NO: 704 - RNA, 20 nt, Artificial Sequence
  source: /note="Description of Artificial Sequence: Synthetic oligonucleotide"
uagggcccgguccggaucgg

SEQ ID NO: 705 - RNA, 20 nt, Artificial Sequence
  source: /note="Description of Artificial Sequence: Synthetic oligonucleotide"
guagggcccgguccggaucg

SEQ ID NO: 706 - RNA, 20 nt, Artificial Sequence
  source: /note="Description of Artificial Sequence: Synthetic oligonucleotide"
gguagggcccgguccggauc

SEQ ID NO: 707 - RNA, 20 nt, Artificial Sequence
  source: /note="Description of Artificial Sequence: Synthetic oligonucleotide"
agguagggcccgguccggau

SEQ ID NO: 708 - RNA, 20 nt, Artificial Sequence
  source: /note="Description of Artificial Sequence: Synthetic oligonucleotide"
cuacugcccccgauccggac

SEQ ID NO: 709 - RNA, 20 nt, Artificial Sequence
  source: /note="Description of Artificial Sequence: Synthetic oligonucleotide"
uacugcccccgauccggacc

SEQ ID NO: 710 - RNA, 20 nt, Artificial Sequence
  source: /note="Description of Artificial Sequence: Synthetic oligonucleotide"
cacacagguagggcccgguc

SEQ ID NO: 711 - RNA, 20 nt, Artificial Sequence
  source: /note="Description of Artificial Sequence: Synthetic oligonucleotide"
cagcucacacagguagggcc

SEQ ID NO: 712 - RNA, 20 nt, Artificial Sequence
  source: /note="Description of Artificial Sequence: Synthetic oligonucleotide"
uccagcagcucacacaggua

SEQ ID NO: 713 - RNA, 20 nt, Artificial Sequence
  source: /note="Description of Artificial Sequence: Synthetic oligonucleotide"
gcccuaccugugugagcugc

SEQ ID NO: 714 - RNA, 20 nt, Artificial Sequence
  source: /note="Description of Artificial Sequence: Synthetic oligonucleotide"
agggguggccagcccagaug

SEQ ID NO: 715 - RNA, 20 nt, Artificial Sequence
  source: /note="Description of Artificial Sequence: Synthetic oligonucleotide"
ucgaugcaugggaacacggc

SEQ ID NO: 716 - RNA, 20 nt, Artificial Sequence
  source: /note="Description of Artificial Sequence: Synthetic oligonucleotide"
gcacucgaugcaugggaaca

SEQ ID NO: 717 - RNA, 20 nt, Artificial Sequence
  source: /note="Description of Artificial Sequence: Synthetic oligonucleotide"
agaugcugcacucgaugcau

SEQ ID NO: 718 - RNA, 20 nt, Artificial Sequence
  source: /note="Description of Artificial Sequence: Synthetic oligonucleotide"
uagaugcugcacucgaugca

SEQ ID NO: 719 - RNA, 20 nt, Artificial Sequence
  source: /note="Description of Artificial Sequence: Synthetic oligonucleotide"
ggcccggggcucggcggugc

SEQ ID NO: 720 - RNA, 20 nt, Artificial Sequence
  source: /note="Description of Artificial Sequence: Synthetic oligonucleotide"
agccagcaccgccgagcccc

SEQ ID NO: 721 - RNA, 20 nt, Artificial Sequence
  source: /note="Description of Artificial Sequence: Synthetic oligonucleotide"
uccgcagggggcuccuggcc

SEQ ID NO: 722 - RNA, 20 nt, Artificial Sequence
  source: /note="Description of Artificial Sequence: Synthetic oligonucleotide"
gccagcggggccagguccgc

SEQ ID NO: 723 - RNA, 20 nt, Artificial Sequence
  source: /note="Description of Artificial Sequence: Synthetic oligonucleotide"
acacuccccgcaggccagcg

SEQ ID NO: 724 - RNA, 20 nt, Artificial Sequence
  source: /note="Description of Artificial Sequence: Synthetic oligonucleotide"
ccacacuccccgcaggccag

SEQ ID NO: 725 - RNA, 20 nt, Artificial Sequence
  source: /note="Description of Artificial Sequence: Synthetic oligonucleotide"
cggugcugcuccagggcagu

SEQ ID NO: 726 - RNA, 20 nt, Artificial Sequence
  source: /note="Description of Artificial Sequence: Synthetic oligonucleotide"
cucccgggagaagaucauug

SEQ ID NO: 727 - RNA, 20 nt, Artificial Sequence
  source: /note="Description of Artificial Sequence: Synthetic oligonucleotide"
gaagcaaguuccaggagacg

SEQ ID NO: 728 - RNA, 20 nt, Artificial Sequence
  source: /note="Description of Artificial Sequence: Synthetic oligonucleotide"
aagcaaguuccaggagacga

SEQ ID NO: 729 - RNA, 20 nt, Artificial Sequence
  source: /note="Description of Artificial Sequence: Synthetic oligonucleotide"
uccaggagacgagggccggg

SEQ ID NO: 730 - RNA, 20 nt, Artificial Sequence
  source: /note="Description of Artificial Sequence: Synthetic oligonucleotide"
cacauaggcccuggaugaau

SEQ ID NO: 731 - RNA, 20 nt, Artificial Sequence
  source: /note="Description of Artificial Sequence: Synthetic oligonucleotide"
ucuuuggcaccaauucaucc

SEQ ID NO: 732 - RNA, 20 nt, Artificial Sequence
  source: /note="Description of Artificial Sequence: Synthetic oligonucleotide"
ggcaugcugcacauaggccc

SEQ ID NO: 733 - RNA, 20 nt, Artificial Sequence
  source: /note="Description of Artificial Sequence: Synthetic oligonucleotide"
cagcuuggcaugcugcacau

SEQ ID NO: 734 - RNA, 20 nt, Artificial Sequence
  source: /note="Description of Artificial Sequence: Synthetic oligonucleotide"
gggcucacgcaugugcagcu

SEQ ID NO: 735 - RNA, 20 nt, Artificial Sequence
  source: /note="Description of Artificial Sequence: Synthetic oligonucleotide"
cugcacaugcgugagccccc

SEQ ID NO: 736 - RNA, 20 nt, Artificial Sequence
  source: /note="Description of Artificial Sequence: Synthetic oligonucleotide"
ucuuugguggucuggccugg

SEQ ID NO: 737 - RNA, 20 nt, Artificial Sequence
  source: /note="Description of Artificial Sequence: Synthetic oligonucleotide"
ggcucuuugguggucuggcc

SEQ ID NO: 738 - RNA, 20 nt, Artificial Sequence
  source: /note="Description of Artificial Sequence: Synthetic oligonucleotide"
caaaaggcucuuuggugguc

SEQ ID NO: 739 - RNA, 20 nt, Artificial Sequence
  source: /note="Description of Artificial Sequence: Synthetic oligonucleotide"
gccuccaaaaggcucuuugg

SEQ ID NO: 740 - RNA, 20 nt, Artificial Sequence
  source: /note="Description of Artificial Sequence: Synthetic oligonucleotide"
gcugccuccaaaaggcucuu

SEQ ID NO: 741 - RNA, 20 nt, Artificial Sequence
  source: /note="Description of Artificial Sequence: Synthetic oligonucleotide"
accaccaaagagccuuuugg

SEQ ID NO: 742 - RNA, 20 nt, Artificial Sequence
  source: /note="Description of Artificial Sequence: Synthetic oligonucleotide"
agggcgcuggccucagggcu

SEQ ID NO: 743 - RNA, 20 nt, Artificial Sequence
  source: /note="Description of Artificial Sequence: Synthetic oligonucleotide"
cuccguagggcugauagagg

SEQ ID NO: 744 - RNA, 20 nt, Artificial Sequence
  source: /note="Description of Artificial Sequence: Synthetic oligonucleotide"
gcccuccucuaucagcccua

SEQ ID NO: 745 - RNA, 20 nt, Artificial Sequence
  source: /note="Description of Artificial Sequence: Synthetic oligonucleotide"
cacagaagacacaggcgcug

SEQ ID NO: 746 - RNA, 20 nt, Artificial Sequence
  source: /note="Description of Artificial Sequence: Synthetic oligonucleotide"
ggggaaaccacagaagacac

SEQ ID NO: 747 - RNA, 20 nt, Artificial Sequence
  source: /note="Description of Artificial Sequence: Synthetic oligonucleotide"
gcaggcucucgcugggcgcg

SEQ ID NO: 748 - RNA, 20 nt, Artificial Sequence
  source: /note="Description of Artificial Sequence: Synthetic oligonucleotide"
cgcccagcgagagccugcuc

SEQ ID NO: 749 - RNA, 20 nt, Artificial Sequence
  source: /note="Description of Artificial Sequence: Synthetic oligonucleotide"
gcccagcgagagccugcuca

SEQ ID NO: 750 - RNA, 20 nt, Artificial Sequence
  source: /note="Description of Artificial Sequence: Synthetic oligonucleotide"
gccugcucagggagcacgug

SEQ ID NO: 751 - RNA, 20 nt, Artificial Sequence
  source: /note="Description of Artificial Sequence: Synthetic oligonucleotide"
ucgccauccuccucccagug

SEQ ID NO: 752 - RNA, 20 nt, Artificial Sequence
  source: /note="Description of Artificial Sequence: Synthetic oligonucleotide"
cucgccauccuccucccagu

SEQ ID NO: 753 - RNA, 20 nt, Artificial Sequence
  source: /note="Description of Artificial Sequence: Synthetic oligonucleotide"
ccucgccauccuccucccag

SEQ ID NO: 754 - RNA, 20 nt, Artificial Sequence
  source: /note="Description of Artificial Sequence: Synthetic oligonucleotide"
ugagcauccuggcuagugcc

SEQ ID NO: 755 - RNA, 20 nt, Artificial Sequence
  source: /note="Description of Artificial Sequence: Synthetic oligonucleotide"
aguaguccacagcaguguca

SEQ ID NO: 756 - RNA, 20 nt, Artificial Sequence
  source: /note="Description of Artificial Sequence: Synthetic oligonucleotide"
aaguaguccacagcaguguc

SEQ ID NO: 757 - RNA, 20 nt, Artificial Sequence
  source: /note="Description of Artificial Sequence: Synthetic oligonucleotide"
gacacugcuguggacuacuu

SEQ ID NO: 758 - RNA, 20 nt, Artificial Sequence
  source: /note="Description of Artificial Sequence: Synthetic oligonucleotide"
aggguucucccgccacaugg

SEQ ID NO: 759 - RNA, 20 nt, Artificial Sequence
  source: /note="Description of Artificial Sequence: Synthetic oligonucleotide"
caggguucucccgccacaug

SEQ ID NO: 760 - RNA, 20 nt, Artificial Sequence
  source: /note="Description of Artificial Sequence: Synthetic oligonucleotide"
cguccuuggcccccaugugg

SEQ ID NO: 761 - RNA, 20 nt, Artificial Sequence
  source: /note="Description of Artificial Sequence: Synthetic oligonucleotide"
gcaggguucucccgccacau

SEQ ID NO: 762 - RNA, 20 nt, Artificial Sequence
  source: /note="Description of Artificial Sequence: Synthetic oligonucleotide"
agcaggguucucccgccaca

SEQ ID NO: 763 - RNA, 20 nt, Artificial Sequence
  source: /note="Description of Artificial Sequence: Synthetic oligonucleotide"
ugcuggauacgaccccagcc

SEQ ID NO: 764 - RNA, 20 nt, Artificial Sequence
  source: /note="Description of Artificial Sequence: Synthetic oligonucleotide"
augcucagcugcuggcaucc

SEQ ID NO: 765 - RNA, 20 nt, Artificial Sequence
  source: /note="Description of Artificial Sequence: Synthetic oligonucleotide"
cugucaaagccacuccugca

SEQ ID NO: 766 - RNA, 20 nt, Artificial Sequence
  source: /note="Description of Artificial Sequence: Synthetic oligonucleotide"
gccucuggcccgugccaugc

SEQ ID NO: 767 - RNA, 20 nt, Artificial Sequence
  source: /note="Description of Artificial Sequence: Synthetic oligonucleotide"
uccugcauggcacgggccag

SEQ ID NO: 768 - RNA, 20 nt, Artificial Sequence
  source: /note="Description of Artificial Sequence: Synthetic oligonucleotide"
ggcacgggccagaggccucu

SEQ ID NO: 769 - RNA, 20 nt, Artificial Sequence
  source: /note="Description of Artificial Sequence: Synthetic oligonucleotide"
cgggccagaggccucucgga

SEQ ID NO: 770 - RNA, 20 nt, Artificial Sequence
  source: /note="Description of Artificial Sequence: Synthetic oligonucleotide"
ggaaaggccagccuuccgag

SEQ ID NO: 771 - RNA, 20 nt, Artificial Sequence
  source: /note="Description of Artificial Sequence: Synthetic oligonucleotide"
cccgagcuguaaggaguagg

SEQ ID NO: 772 - RNA, 20 nt, Artificial Sequence
  source: /note="Description of Artificial Sequence: Synthetic oligonucleotide"
cucccgagcuguaaggagua

SEQ ID NO: 773 - RNA, 20 nt, Artificial Sequence
  source: /note="Description of Artificial Sequence: Synthetic oligonucleotide"
ucucccgagcuguaaggagu

SEQ ID NO: 774 - RNA, 20 nt, Artificial Sequence
  source: /note="Description of Artificial Sequence: Synthetic oligonucleotide"
acccccuacuccuuacagcu

SEQ ID NO: 775 - RNA, 20 nt, Artificial Sequence
  source: /note="Description of Artificial Sequence: Synthetic oligonucleotide"
aaaagcaccguccacccaca

SEQ ID NO: 776 - RNA, 20 nt, Artificial Sequence
  source: /note="Description of Artificial Sequence: Synthetic oligonucleotide"
aaagcaccguccacccacaa

SEQ ID NO: 777 - RNA, 20 nt, Artificial Sequence
  source: /note="Description of Artificial Sequence: Synthetic oligonucleotide"
caccguccacccacaagggc

SEQ ID NO: 778 - RNA, 20 nt, Artificial Sequence
  source: /note="Description of Artificial Sequence: Synthetic oligonucleotide"
accguccacccacaagggcu

SEQ ID NO: 779 - RNA, 20 nt, Artificial Sequence
  source: /note="Description of Artificial Sequence: Synthetic oligonucleotide"
cguccacccacaagggcugg

SEQ ID NO: 780 - RNA, 20 nt, Artificial Sequence
  source: /note="Description of Artificial Sequence: Synthetic oligonucleotide"
cacaagggcugggggaacgg

SEQ ID NO: 781 - RNA, 20 nt, Artificial Sequence
  source: /note="Description of Artificial Sequence: Synthetic oligonucleotide"
ugggggaacggaggcgcccu

SEQ ID NO: 782 - RNA, 20 nt, Artificial Sequence
  source: /note="Description of Artificial Sequence: Synthetic oligonucleotide"
aggggaaaaauccaucucgg

SEQ ID NO: 783 - RNA, 20 nt, Artificial Sequence
  source: /note="Description of Artificial Sequence: Synthetic oligonucleotide"
gugaaaagaccccauuuuca

SEQ ID NO: 784 - RNA, 20 nt, Artificial Sequence
  source: /note="Description of Artificial Sequence: Synthetic oligonucleotide"
ggugaaaagaccccauuuuc

SEQ ID NO: 785 - RNA, 20 nt, Artificial Sequence
  source: /note="Description of Artificial Sequence: Synthetic oligonucleotide"
cgccugcgggaugaggcugg

SEQ ID NO: 786 - RNA, 20 nt, Artificial Sequence
  source: /note="Description of Artificial Sequence: Synthetic oligonucleotide"
gccgccugcgggaugaggcu

SEQ ID NO: 787 - RNA, 20 nt, Artificial Sequence
  source: /note="Description of Artificial Sequence: Synthetic oligonucleotide"
ggccgccugcgggaugaggc

SEQ ID NO: 788 - RNA, 20 nt, Artificial Sequence
  source: /note="Description of Artificial Sequence: Synthetic oligonucleotide"
ccagggccgccugcgggaug

SEQ ID NO: 789 - RNA, 20 nt, Artificial Sequence
  source: /note="Description of Artificial Sequence: Synthetic oligonucleotide"
ccucaucccgcaggcggccc

SEQ ID NO: 790 - RNA, 20 nt, Artificial Sequence
  source: /note="Description of Artificial Sequence: Synthetic oligonucleotide"
gaaugccugcuucagcucca

SEQ ID NO: 791 - RNA, 20 nt, Artificial Sequence
  source: /note="Description of Artificial Sequence: Synthetic oligonucleotide"
gcugaagcaggcauuccgag

SEQ ID NO: 792 - RNA, 20 nt, Artificial Sequence
  source: /note="Description of Artificial Sequence: Synthetic oligonucleotide"
gcacaauggguaccaucccu

SEQ ID NO: 793 - RNA, 20 nt, Artificial Sequence
  source: /note="Description of Artificial Sequence: Synthetic oligonucleotide"
agcuucgccacgagcacaau

SEQ ID NO: 794 - RNA, 20 nt, Artificial Sequence
  source: /note="Description of Artificial Sequence: Synthetic oligonucleotide"
gaugguacccauugugcucg

SEQ ID NO: 795 - RNA, 20 nt, Artificial Sequence
  source: /note="Description of Artificial Sequence: Synthetic oligonucleotide"
cauugugcucguggcgaagc

SEQ ID NO: 796 - RNA, 20 nt, Artificial Sequence
  source: /note="Description of Artificial Sequence: Synthetic oligonucleotide"
auugugcucguggcgaagcu

SEQ ID NO: 797 - RNA, 20 nt, Artificial Sequence
  source: /note="Description of Artificial Sequence: Synthetic oligonucleotide"
cgcaggucauggcggcagcc

SEQ ID NO: 798 - RNA, 20 nt, Artificial Sequence
  source: /note="Description of Artificial Sequence: Synthetic oligonucleotide"
gcaggucauggcggcagcca

SEQ ID NO: 799 - RNA, 20 nt, Artificial Sequence
  source: /note="Description of Artificial Sequence: Synthetic oligonucleotide"
uccucgggcugcaaccuugg

SEQ ID NO: 800 - RNA, 20 nt, Artificial Sequence
  source: /note="Description of Artificial Sequence: Synthetic oligonucleotide"
gcuccucgggcugcaaccuu

SEQ ID NO: 801 - RNA, 20 nt, Artificial Sequence
  source: /note="Description of Artificial Sequence: Synthetic oligonucleotide"
gcccccaagguugcagcccg

SEQ ID NO: 802 - RNA, 20 nt, Artificial Sequence
  source: /note="Description of Artificial Sequence: Synthetic oligonucleotide"
agguugcagcccgaggagcu

SEQ ID NO: 803 - RNA, 20 nt, Artificial Sequence
  source: /note="Description of Artificial Sequence: Synthetic oligonucleotide"
cguccaggagcaggaagucc

SEQ ID NO: 804 - RNA, 20 nt, Artificial Sequence
  source: /note="Description of Artificial Sequence: Synthetic oligonucleotide"
ccagcggcgcguccaggagc

SEQ ID NO: 805 - RNA, 20 nt, Artificial Sequence
  source: /note="Description of Artificial Sequence: Synthetic oligonucleotide"
ggccgcccagcggcgcgucc

SEQ ID NO: 806 - RNA, 20 nt, Artificial Sequence
  source: /note="Description of Artificial Sequence: Synthetic oligonucleotide"
ccugcuccuggacgcgccgc

SEQ ID NO: 807 - RNA, 20 nt, Artificial Sequence
  source: /note="Description of Artificial Sequence: Synthetic oligonucleotide"
cugcuccuggacgcgccgcu

SEQ ID NO: 808 - RNA, 20 nt, Artificial Sequence
  source: /note="Description of Artificial Sequence: Synthetic oligonucleotide"
cuccuggacgcgccgcuggg

SEQ ID NO: 809 - RNA, 20 nt, Artificial Sequence
  source: /note="Description of Artificial Sequence: Synthetic oligonucleotide"
cgcgccgcugggcggcccgc

SEQ ID NO: 810 - RNA, 20 nt, Artificial Sequence
  source: /note="Description of Artificial Sequence: Synthetic oligonucleotide"
gcgccgcugggcggcccgcu

SEQ ID NO: 811 - RNA, 20 nt, Artificial Sequence
  source: /note="Description of Artificial Sequence: Synthetic oligonucleotide"
cgccgcugggcggcccgcug

SEQ ID NO: 812 - RNA, 20 nt, Artificial Sequence
  source: /note="Description of Artificial Sequence: Synthetic oligonucleotide"
ggaguguguccagccccagc

SEQ ID NO: 813 - RNA, 20 nt, Artificial Sequence
  source: /note="Description of Artificial Sequence: Synthetic oligonucleotide"
gggcuggacacacuccugga

SEQ ID NO: 814 - RNA, 20 nt, Artificial Sequence
  source: /note="Description of Artificial Sequence: Synthetic oligonucleotide"
ccauggccggauccccaucc

SEQ ID NO: 815 - RNA, 20 nt, Artificial Sequence
  source: /note="Description of Artificial Sequence: Synthetic oligonucleotide"
ucgugcuucagugccauggc

SEQ ID NO: 816 - RNA, 20 nt, Artificial Sequence
  source: /note="Description of Artificial Sequence: Synthetic oligonucleotide"
ggaagcgaucggggcaguag

SEQ ID NO: 817 - RNA, 20 nt, Artificial Sequence
  source: /note="Description of Artificial Sequence: Synthetic oligonucleotide"
uggaagcgaucggggcagua

SEQ ID NO: 818 - RNA, 20 nt, Artificial Sequence
  source: /note="Description of Artificial Sequence: Synthetic oligonucleotide"
guggaagcgaucggggcagu

SEQ ID NO: 819 - RNA, 20 nt, Artificial Sequence
  source: /note="Description of Artificial Sequence: Synthetic oligonucleotide"
ugccguuguggaagcgaucg

SEQ ID NO: 820 - RNA, 20 nt, Artificial Sequence
  source: /note="Description of Artificial Sequence: Synthetic oligonucleotide"
augccguuguggaagcgauc

SEQ ID NO: 821 - RNA, 20 nt, Artificial Sequence
  source: /note="Description of Artificial Sequence: Synthetic oligonucleotide"
gaugccguuguggaagcgau

SEQ ID NO: 822 - RNA, 20 nt, Artificial Sequence
  source: /note="Description of Artificial Sequence: Synthetic oligonucleotide"
ugccccgaucgcuuccacaa

SEQ ID NO: 823 - RNA, 20 nt, Artificial Sequence
  source: /note="Description of Artificial Sequence: Synthetic oligonucleotide"
gaucgcuuccacaacggcau

SEQ ID NO: 824 - RNA, 20 nt, Artificial Sequence
  source: /note="Description of Artificial Sequence: Synthetic oligonucleotide"
cuuccacaacggcaucggcu

SEQ ID NO: 825 - RNA, 20 nt, Artificial Sequence
  source: /note="Description of Artificial Sequence: Synthetic oligonucleotide"
cagguggccccggacguggu

SEQ ID NO: 826 - RNA, 20 nt, Artificial Sequence
  source: /note="Description of Artificial Sequence: Synthetic oligonucleotide"
ucggcuuggccaaccacguc

SEQ ID NO: 827 - RNA, 20 nt, Artificial Sequence
  source: /note="Description of Artificial Sequence: Synthetic oligonucleotide"
cggcuuggccaaccacgucc

SEQ ID NO: 828 - RNA, 20 nt, Artificial Sequence
  source: /note="Description of Artificial Sequence: Synthetic oligonucleotide"
ggcuuggccaaccacguccg

SEQ ID NO: 829 - RNA, 20 nt, Artificial Sequence
  source: /note="Description of Artificial Sequence: Synthetic oligonucleotide"
gguucagguggccccggacg

SEQ ID NO: 830 - RNA, 20 nt, Artificial Sequence
  source: /note="Description of Artificial Sequence: Synthetic oligonucleotide"
ccacgcgguucagguggccc

SEQ ID NO: 831 - RNA, 20 nt, Artificial Sequence
  source: /note="Description of Artificial Sequence: Synthetic oligonucleotide"
ugacgcccacgcgguucagg

SEQ ID NO: 832 - RNA, 20 nt, Artificial Sequence
  source: /note="Description of Artificial Sequence: Synthetic oligonucleotide"
agcugacgcccacgcgguuc

SEQ ID NO: 833 - RNA, 20 nt, Artificial Sequence
  source: /note="Description of Artificial Sequence: Synthetic oligonucleotide"
ccggggccaccugaaccgcg

SEQ ID NO: 834 - RNA, 20 nt, Artificial Sequence
  source: /note="Description of Artificial Sequence: Synthetic oligonucleotide"
cggggccaccugaaccgcgu

SEQ ID NO: 835 - RNA, 20 nt, Artificial Sequence
  source: /note="Description of Artificial Sequence: Synthetic oligonucleotide"
cauuguagcugacgcccacg

SEQ ID NO: 836 - RNA, 20 nt, Artificial Sequence
  source: /note="Description of Artificial Sequence: Synthetic oligonucleotide"
ccuccucagcggagaugaaa

SEQ ID NO: 837 - RNA, 20 nt, Artificial Sequence
  source: /note="Description of Artificial Sequence: Synthetic oligonucleotide"
gcgccauuucaucuccgcug

SEQ ID NO: 838 - RNA, 20 nt, Artificial Sequence
  source: /note="Description of Artificial Sequence: Synthetic oligonucleotide"
ccauuucaucuccgcugagg

SEQ ID NO: 839 - RNA, 20 nt, Artificial Sequence
  source: /note="Description of Artificial Sequence: Synthetic oligonucleotide"
gaaggagaaccugcgcucaa

SEQ ID NO: 840 - RNA, 20 nt, Artificial Sequence
  source: /note="Description of Artificial Sequence: Synthetic oligonucleotide"
aggugaaggccauugagcgc

SEQ ID NO: 841 - RNA, 20 nt, Artificial Sequence
  source: /note="Description of Artificial Sequence: Synthetic oligonucleotide"
uuaaaggcccaggagacaca

SEQ ID NO: 842 - RNA, 20 nt, Artificial Sequence
  source: /note="Description of Artificial Sequence: Synthetic oligonucleotide"
agagaauuuagaucaacggu

SEQ ID NO: 843 - RNA, 20 nt, Artificial Sequence
  source: /note="Description of Artificial Sequence: Synthetic oligonucleotide"
gagagaauuuagaucaacgg

SEQ ID NO: 844 - RNA, 20 nt, Artificial Sequence
  source: /note="Description of Artificial Sequence: Synthetic oligonucleotide"
gucccccugcuuggcgcuaa

SEQ ID NO: 845 - RNA, 20 nt, Artificial Sequence
  source: /note="Description of Artificial Sequence: Synthetic oligonucleotide"
ugucccccugcuuggcgcua

SEQ ID NO: 846 - RNA, 20 nt, Artificial Sequence
  source: /note="Description of Artificial Sequence: Synthetic oligonucleotide"
ucucucccuuagcgccaagc

SEQ ID NO: 847 - RNA, 20 nt, Artificial Sequence
  source: /note="Description of Artificial Sequence: Synthetic oligonucleotide"
cucucccuuagcgccaagca

SEQ ID NO: 848 - RNA, 20 nt, Artificial Sequence
  source: /note="Description of Artificial Sequence: Synthetic oligonucleotide"
ucucccuuagcgccaagcag

SEQ ID NO: 849 - RNA, 20 nt, Artificial Sequence
  source: /note="Description of Artificial Sequence: Synthetic oligonucleotide"
agcgccaagcagggggacac

SEQ ID NO: 850 - RNA, 20 nt, Artificial Sequence
  source: /note="Description of Artificial Sequence: Synthetic oligonucleotide"
gcgccaagcagggggacacu

SEQ ID NO: 851 - RNA, 20 nt, Artificial Sequence
  source: /note="Description of Artificial Sequence: Synthetic oligonucleotide"
cgccaagcagggggacacug

SEQ ID NO: 852 - RNA, 20 nt, Artificial Sequence
  source: /note="Description of Artificial Sequence: Synthetic oligonucleotide"
cuguggcucucaagucucuc

SEQ ID NO: 853 - RNA, 20 nt, Artificial Sequence
  source: /note="Description of Artificial Sequence: Synthetic oligonucleotide"
ccacacauccaccgaccagg

SEQ ID NO: 854 - RNA, 20 nt, Artificial Sequence
  source: /note="Description of Artificial Sequence: Synthetic oligonucleotide"
ucuccacacauccaccgacc

SEQ ID NO: 855 - RNA, 20 nt, Artificial Sequence
  source: /note="Description of Artificial Sequence: Synthetic oligonucleotide"
gcuggaauggccaggggacu

SEQ ID NO: 856 - RNA, 20 nt, Artificial Sequence
  source: /note="Description of Artificial Sequence: Synthetic oligonucleotide"
guggagacgccccagucccc

SEQ ID NO: 857 - RNA, 20 nt, Artificial Sequence
  source: /note="Description of Artificial Sequence: Synthetic oligonucleotide"
ccaguggcuggaauggccag

SEQ ID NO: 858 - RNA, 20 nt, Artificial Sequence
  source: /note="Description of Artificial Sequence: Synthetic oligonucleotide"
cuccaguggcuggaauggcc

SEQ ID NO: 859 - RNA, 20 nt, Artificial Sequence
  source: /note="Description of Artificial Sequence: Synthetic oligonucleotide"
cuggccauuccagccacugg

SEQ ID NO: 860 - RNA, 20 nt, Artificial Sequence
  source: /note="Description of Artificial Sequence: Synthetic oligonucleotide"
uggguagaagagucagccuc

SEQ ID NO: 861 - RNA, 20 nt, Artificial Sequence
  source: /note="Description of Artificial Sequence: Synthetic oligonucleotide"
uucugaagcuggccagugug

SEQ ID NO: 862 - RNA, 20 nt, Artificial Sequence
  source: /note="Description of Artificial Sequence: Synthetic oligonucleotide"
uggccagcuucagaaccccc

SEQ ID NO: 863 - RNA, 20 nt, Artificial Sequence
  source: /note="Description of Artificial Sequence: Synthetic oligonucleotide"
ggccagcuucagaacccccu

SEQ ID NO: 864 - RNA, 20 nt, Artificial Sequence
  source: /note="Description of Artificial Sequence: Synthetic oligonucleotide"
aaccuuacaggcagccccag

SEQ ID NO: 865 - RNA, 20 nt, Artificial Sequence
  source: /note="Description of Artificial Sequence: Synthetic oligonucleotide"
caaaccuuacaggcagcccc

SEQ ID NO: 866 - RNA, 20 nt, Artificial Sequence
  source: /note="Description of Artificial Sequence: Synthetic oligonucleotide"
gaaucagagccuuguacugu

SEQ ID NO: 867 - RNA, 20 nt, Artificial Sequence
  source: /note="Description of Artificial Sequence: Synthetic oligonucleotide"
ggaaucagagccuuguacug

SEQ ID NO: 868 - RNA, 20 nt, Artificial Sequence
  source: /note="Description of Artificial Sequence: Synthetic oligonucleotide"
uguuuccaacaggagcaccc

SEQ ID NO: 869 - RNA, 20 nt, Artificial Sequence
  source: /note="Description of Artificial Sequence: Synthetic oligonucleotide"
guuuccaacaggagcacccu

SEQ ID NO: 870 - RNA, 20 nt, Artificial Sequence
  source: /note="Description of Artificial Sequence: Synthetic oligonucleotide"
gccaaugucagaaccaccca

SEQ ID NO: 871 - RNA, 20 nt, Artificial Sequence
  source: /note="Description of Artificial Sequence: Synthetic oligonucleotide"
acccugggugguucugacau

SEQ ID NO: 872 - RNA, 20 nt, Artificial Sequence
  source: /note="Description of Artificial Sequence: Synthetic oligonucleotide"
uggcagacacaaagcccacu

SEQ ID NO: 873 - RNA, 20 nt, Artificial Sequence
  source: /note="Description of Artificial Sequence: Synthetic oligonucleotide"
ggcagacacaaagcccacuu

SEQ ID NO: 874 - RNA, 20 nt, Artificial Sequence
  source: /note="Description of Artificial Sequence: Synthetic oligonucleotide"
auacuggcaccuccccaagu

SEQ ID NO: 875 - RNA, 20 nt, Artificial Sequence
  source: /note="Description of Artificial Sequence: Synthetic oligonucleotide"
cauacuggcaccuccccaag

SEQ ID NO: 876 - RNA, 20 nt, Artificial Sequence
  source: /note="Description of Artificial Sequence: Synthetic oligonucleotide"
cacuuggggaggugccagua

SEQ ID NO: 877 - RNA, 20 nt, Artificial Sequence
  source: /note="Description of Artificial Sequence: Synthetic oligonucleotide"
gggggcaaggggugacaacc

SEQ ID NO: 878 - RNA, 20 nt, Artificial Sequence
  source: /note="Description of Artificial Sequence: Synthetic oligonucleotide"
cacucggugucgucacugcc

SEQ ID NO: 879 - RNA, 20 nt, Artificial Sequence
  source: /note="Description of Artificial Sequence: Synthetic oligonucleotide"
gcaucucagcccugcucacu

SEQ ID NO: 880 - RNA, 20 nt, Artificial Sequence
  source: /note="Description of Artificial Sequence: Synthetic oligonucleotide"
agugacgacaccgagugagc

SEQ ID NO: 881 - RNA, 20 nt, Artificial Sequence
  source: /note="Description of Artificial Sequence: Synthetic oligonucleotide"
gugacgacaccgagugagca

SEQ ID NO: 882 - RNA, 20 nt, Artificial Sequence
  source: /note="Description of Artificial Sequence: Synthetic oligonucleotide"
ggcugagaugcggggaaagc

SEQ ID NO: 883 - RNA, 20 nt, Artificial Sequence
  source: /note="Description of Artificial Sequence: Synthetic oligonucleotide"
gcugagaugcggggaaagcu

SEQ ID NO: 884 - RNA, 20 nt, Artificial Sequence
  source: /note="Description of Artificial Sequence: Synthetic oligonucleotide"
cggggaaagcugggagaacc

SEQ ID NO: 885 - RNA, 20 nt, Artificial Sequence
  source: /note="Description of Artificial Sequence: Synthetic oligonucleotide"
gagcccugcaacuggaguua

SEQ ID NO: 886 - RNA, 20 nt, Artificial Sequence
  source: /note="Description of Artificial Sequence: Synthetic oligonucleotide"
agucccuaacuccaguugca

SEQ ID NO: 887 - RNA, 20 nt, Artificial Sequence
  source: /note="Description of Artificial Sequence: Synthetic oligonucleotide"
uggauguaaugcccucugcu

SEQ ID NO: 888 - RNA, 20 nt, Artificial Sequence
  source: /note="Description of Artificial Sequence: Synthetic oligonucleotide"
gaguaaaaauagucacgaga

SEQ ID NO: 889 - RNA, 20 nt, Artificial Sequence
  source: /note="Description of Artificial Sequence: Synthetic oligonucleotide"
gaugauggcagguccacaac

SEQ ID NO: 890 - RNA, 20 nt, Artificial Sequence
  source: /note="Description of Artificial Sequence: Synthetic oligonucleotide"
ucugcaaaaacccuucucca

SEQ ID NO: 891 - RNA, 20 nt, Artificial Sequence
  source: /note="Description of Artificial Sequence: Synthetic oligonucleotide"
acaucuggcaacgucaagga

SEQ ID NO: 892 - RNA, 20 nt, Artificial Sequence
  source: /note="Description of Artificial Sequence: Synthetic oligonucleotide"
cacaucuggcaacgucaagg

SEQ ID NO: 893 - RNA, 20 nt, Artificial Sequence
  source: /note="Description of Artificial Sequence: Synthetic oligonucleotide"
ucccacaucuggcaacguca

SEQ ID NO: 894 - RNA, 20 nt, Artificial Sequence
  source: /note="Description of Artificial Sequence: Synthetic oligonucleotide"
cuccuugacguugccagaug

SEQ ID NO: 895 - RNA, 20 nt, Artificial Sequence
  source: /note="Description of Artificial Sequence: Synthetic oligonucleotide"
agauacccccuucccacauc

SEQ ID NO: 896 - RNA, 20 nt, Artificial Sequence
  source: /note="Description of Artificial Sequence: Synthetic oligonucleotide"
ugacguugccagauguggga

SEQ ID NO: 897 - RNA, 20 nt, Artificial Sequence
  source: /note="Description of Artificial Sequence: Synthetic oligonucleotide"
gacguugccagaugugggaa

SEQ ID NO: 898 - RNA, 20 nt, Artificial Sequence
  source: /note="Description of Artificial Sequence: Synthetic oligonucleotide"
acguugccagaugugggaag

SEQ ID NO: 899 - RNA, 20 nt, Artificial Sequence
  source: /note="Description of Artificial Sequence: Synthetic oligonucleotide"
gaugugggaaggggguaucu

SEQ ID NO: 900 - RNA, 20 nt, Artificial Sequence
  source: /note="Description of Artificial Sequence: Synthetic oligonucleotide"
gagggucaggcuuccuggaa

SEQ ID NO: 901 - RNA, 20 nt, Artificial Sequence
  source: /note="Description of Artificial Sequence: Synthetic oligonucleotide"
ucaggcuuccuggaaugggg

SEQ ID NO: 902 - RNA, 20 nt, Artificial Sequence
  source: /note="Description of Artificial Sequence: Synthetic oligonucleotide"
gcuuccuggaaugggguggg

SEQ ID NO: 903 - RNA, 20 nt, Artificial Sequence
  source: /note="Description of Artificial Sequence: Synthetic oligonucleotide"
gaugcacgagcugagagcug

SEQ ID NO: 904 - RNA, 20 nt, Artificial Sequence
  source: /note="Description of Artificial Sequence: Synthetic oligonucleotide"
acggggaagaaaggcagucc

SEQ ID NO: 905 - RNA, 20 nt, Artificial Sequence
  source: /note="Description of Artificial Sequence: Synthetic oligonucleotide"
ccauauucagggcuucaccc

SEQ ID NO: 906 - RNA, 20 nt, Artificial Sequence
  source: /note="Description of Artificial Sequence: Synthetic oligonucleotide"
ccagggugaagcccugaaua

SEQ ID NO: 907 - RNA, 20 nt, Artificial Sequence
  source: /note="Description of Artificial Sequence: Synthetic oligonucleotide"
cagggugaagcccugaauau

SEQ ID NO: 908 - RNA, 20 nt, Artificial Sequence
  source: /note="Description of Artificial Sequence: Synthetic oligonucleotide"
cccaaccccuccccauauuc

SEQ ID NO: 909 - RNA, 20 nt, Artificial Sequence
  source: /note="Description of Artificial Sequence: Synthetic oligonucleotide"
agggugaagcccugaauaug

SEQ ID NO: 910 - RNA, 20 nt, Artificial Sequence
  source: /note="Description of Artificial Sequence: Synthetic oligonucleotide"
ugaagcccugaauaugggga

SEQ ID NO: 911 - RNA, 20 nt, Artificial Sequence
  source: /note="Description of Artificial Sequence: Synthetic oligonucleotide"
gaagcccugaauauggggag

SEQ ID NO: 912 - RNA, 20 nt, Artificial Sequence
  source: /note="Description of Artificial Sequence: Synthetic oligonucleotide"
ugggucaaaguuggccacug

SEQ ID NO: 913 - RNA, 20 nt, Artificial Sequence
  source: /note="Description of Artificial Sequence: Synthetic oligonucleotide"
acaguggccaacuuugaccc

SEQ ID NO: 914 - RNA, 20 nt, Artificial Sequence
  source: /note="Description of Artificial Sequence: Synthetic oligonucleotide"
cgcagaagucacagcgcauc

SEQ ID NO: 915 - RNA, 20 nt, Artificial Sequence
  source: /note="Description of Artificial Sequence: Synthetic oligonucleotide"
gaugcgcugugacuucugcg

SEQ ID NO: 916 - RNA, 20 nt, Artificial Sequence
  source: /note="Description of Artificial Sequence: Synthetic oligonucleotide"
cgcugugacuucugcggggc

SEQ ID NO: 917 - RNA, 20 nt, Artificial Sequence
  source: /note="Description of Artificial Sequence: Synthetic oligonucleotide"
gcggggcuggcuucgacaca

SEQ ID NO: 918 - RNA, 20 nt, Artificial Sequence
  source: /note="Description of Artificial Sequence: Synthetic oligonucleotide"
gcuggcuucgacacacgggc

SEQ ID NO: 919 - RNA, 20 nt, Artificial Sequence
  source: /note="Description of Artificial Sequence: Synthetic oligonucleotide"
ccgggcguggcuggagaggc

SEQ ID NO: 920 - RNA, 20 nt, Artificial Sequence
  source: /note="Description of Artificial Sequence: Synthetic oligonucleotide"
ccggccucuccagccacgcc

SEQ ID NO: 921 - RNA, 20 nt, Artificial Sequence
  source: /note="Description of Artificial Sequence: Synthetic oligonucleotide"
cacguaggugggcccgggcg

SEQ ID NO: 922 - RNA, 20 nt, Artificial Sequence
  source: /note="Description of Artificial Sequence: Synthetic oligonucleotide"
cgaagucacguaggugggcc

SEQ ID NO: 923 - RNA, 20 nt, Artificial Sequence
  source: /note="Description of Artificial Sequence: Synthetic oligonucleotide"
gauaccgaagucacguaggu

SEQ ID NO: 924 - RNA, 20 nt, Artificial Sequence
  source: /note="Description of Artificial Sequence: Synthetic oligonucleotide"
ugauaccgaagucacguagg

SEQ ID NO: 925 - RNA, 20 nt, Artificial Sequence
  source: /note="Description of Artificial Sequence: Synthetic oligonucleotide"
cgggcccaccuacgugacuu

SEQ ID NO: 926 - RNA, 20 nt, Artificial Sequence
  source: /note="Description of Artificial Sequence: Synthetic oligonucleotide"
gugacuucgguaucaccaac

SEQ ID NO: 927 - RNA, 20 nt, Artificial Sequence
  source: /note="Description of Artificial Sequence: Synthetic oligonucleotide"
ugacuucgguaucaccaacu

SEQ ID NO: 928 - RNA, 20 nt, Artificial Sequence
  source: /note="Description of Artificial Sequence: Synthetic oligonucleotide"
agcuccugcaggauguugau

SEQ ID NO: 929 - RNA, 20 nt, Artificial Sequence
  source: /note="Description of Artificial Sequence: Synthetic oligonucleotide"
aggcucucggcccagggggc

SEQ ID NO: 930 - RNA, 20 nt, Artificial Sequence
  source: /note="Description of Artificial Sequence: Synthetic oligonucleotide"
ugagcagccccccagccccc

SEQ ID NO: 931 - RNA, 20 nt, Artificial Sequence
  source: /note="Description of Artificial Sequence: Synthetic oligonucleotide"
ccccaggcucucggcccagg

SEQ ID NO: 932 - RNA, 20 nt, Artificial Sequence
  source: /note="Description of Artificial Sequence: Synthetic oligonucleotide"
gcccccugggccgagagccu

SEQ ID NO: 933 - RNA, 20 nt, Artificial Sequence
  source: /note="Description of Artificial Sequence: Synthetic oligonucleotide"
cgggaggucaggaagcugcc

SEQ ID NO: 934 - RNA, 20 nt, Artificial Sequence
  source: /note="Description of Artificial Sequence: Synthetic oligonucleotide"
gcagcuuccugaccucccgu

SEQ ID NO: 935 - RNA, 20 nt, Artificial Sequence
  source: /note="Description of Artificial Sequence: Synthetic oligonucleotide"
agguaagcggggccgacggg

SEQ ID NO: 936 - RNA, 20 nt, Artificial Sequence
  source: /note="Description of Artificial Sequence: Synthetic oligonucleotide"
gagagguaagcggggccgac

SEQ ID NO: 937 - RNA, 20 nt, Artificial Sequence
  source: /note="Description of Artificial Sequence: Synthetic oligonucleotide"
ugagagguaagcggggccga

SEQ ID NO: 938 - RNA, 20 nt, Artificial Sequence
  source: /note="Description of Artificial Sequence: Synthetic oligonucleotide"
ggcaccgugagagguaagcg

SEQ ID NO: 939 - RNA, 20 nt, Artificial Sequence
  source: /note="Description of Artificial Sequence: Synthetic oligonucleotide"
gggcaccgugagagguaagc

SEQ ID NO: 940 - RNA, 20 nt, Artificial Sequence
  source: /note="Description of Artificial Sequence: Synthetic oligonucleotide"
agggcaccgugagagguaag

SEQ ID NO: 941 - RNA, 20 nt, Artificial Sequence
  source: /note="Description of Artificial Sequence: Synthetic oligonucleotide"
ucggccccgcuuaccucuca

SEQ ID NO: 942 - RNA, 20 nt, Artificial Sequence
  source: /note="Description of Artificial Sequence: Synthetic oligonucleotide"
gguggaaagggcaccgugag

SEQ ID NO: 943 - RNA, 20 nt, Artificial Sequence
  source: /note="Description of Artificial Sequence: Synthetic oligonucleotide"
ucagcccagguggguggaaa

SEQ ID NO: 944 - RNA, 20 nt, Artificial Sequence
  source: /note="Description of Artificial Sequence: Synthetic oligonucleotide"
ggugcccuuuccacccaccu

SEQ ID NO: 945 - RNA, 20 nt, Artificial Sequence
  source: /note="Description of Artificial Sequence: Synthetic oligonucleotide"
ccaccugggcugaggacccu

SEQ ID NO: 946 - RNA, 20 nt, Artificial Sequence
  source: /note="Description of Artificial Sequence: Synthetic oligonucleotide"
caucuccauaggcuggccca

SEQ ID NO: 947 - RNA, 20 nt, Artificial Sequence
  source: /note="Description of Artificial Sequence: Synthetic oligonucleotide"
gaggacccugggccagccua

SEQ ID NO: 948 - RNA, 20 nt, Artificial Sequence
  source: /note="Description of Artificial Sequence: Synthetic oligonucleotide"
cccuuaccaucuccauaggc

SEQ ID NO: 949 - RNA, 20 nt, Artificial Sequence
  source: /note="Description of Artificial Sequence: Synthetic oligonucleotide"
gccagccuauggagauggua

SEQ ID NO: 950 - RNA, 20 nt, Artificial Sequence
  source: /note="Description of Artificial Sequence: Synthetic oligonucleotide"
ccagccuauggagaugguaa

SEQ ID NO: 951 - RNA, 20 nt, Artificial Sequence
  source: /note="Description of Artificial Sequence: Synthetic oligonucleotide"
ccccgccccuccaaugcucu

SEQ ID NO: 952 - RNA, 20 nt, Artificial Sequence
  source: /note="Description of Artificial Sequence: Synthetic oligonucleotide"
caggggcccagagcauugga

SEQ ID NO: 953 - RNA, 20 nt, Artificial Sequence
  source: /note="Description of Artificial Sequence: Synthetic oligonucleotide"
gagcauuggaggggcggggc

SEQ ID NO: 954 - RNA, 20 nt, Artificial Sequence
  source: /note="Description of Artificial Sequence: Synthetic oligonucleotide"
aggacaccuaaauagcaggg

SEQ ID NO: 955 - RNA, 20 nt, Artificial Sequence
  source: /note="Description of Artificial Sequence: Synthetic oligonucleotide"
gaaaggacaccuaaauagca

SEQ ID NO: 956 - RNA, 20 nt, Artificial Sequence
  source: /note="Description of Artificial Sequence: Synthetic oligonucleotide"
uuucacucaggaucugggcc

SEQ ID NO: 957 - RNA, 20 nt, Artificial Sequence
  source: /note="Description of Artificial Sequence: Synthetic oligonucleotide"
acuggauccagaaagagacc

SEQ ID NO: 958 - RNA, 20 nt, Artificial Sequence
  source: /note="Description of Artificial Sequence: Synthetic oligonucleotide"
cauuaacagcaaagaaucug

SEQ ID NO: 959 - RNA, 20 nt, Artificial Sequence
  source: /note="Description of Artificial Sequence: Synthetic oligonucleotide"
uaacagccauacaugaccaa

SEQ ID NO: 960 - RNA, 20 nt, Artificial Sequence
  source: /note="Description of Artificial Sequence: Synthetic oligonucleotide"
caauaggauccccacuagcc

SEQ ID NO: 961 - RNA, 20 nt, Artificial Sequence
  source: /note="Description of Artificial Sequence: Synthetic oligonucleotide"
caggcuaguggggauccuau

SEQ ID NO: 962 - RNA, 20 nt, Artificial Sequence
  source: /note="Description of Artificial Sequence: Synthetic oligonucleotide"
ucagaaaaaaucuagccucu

SEQ ID NO: 963 - RNA, 20 nt, Artificial Sequence
  source: /note="Description of Artificial Sequence: Synthetic oligonucleotide"
ugaaaaucuagacucuaggc

SEQ ID NO: 964 - RNA, 20 nt, Artificial Sequence
  source: /note="Description of Artificial Sequence: Synthetic oligonucleotide"
cugccggauaaagcaaacau

SEQ ID NO: 965 - RNA, 20 nt, Artificial Sequence
  source: /note="Description of Artificial Sequence: Synthetic oligonucleotide"
gaguagcauaucaggucugc

SEQ ID NO: 966 - RNA, 20 nt, Artificial Sequence
  source: /note="Description of Artificial Sequence: Synthetic oligonucleotide"
ugauaauggaguagcauauc

SEQ ID NO: 967 - RNA, 20 nt, Artificial Sequence
  source: /note="Description of Artificial Sequence: Synthetic oligonucleotide"
acguuaaaaucuuaguacag

SEQ ID NO: 968 - RNA, 20 nt, Artificial Sequence
  source: /note="Description of Artificial Sequence: Synthetic oligonucleotide"
aguuguacagacuuacauug

SEQ ID NO: 969 - RNA, 20 nt, Artificial Sequence
  source: /note="Description of Artificial Sequence: Synthetic oligonucleotide"
uuauccuuaaaacagggaca

SEQ ID NO: 970 - RNA, 20 nt, Artificial Sequence
  source: /note="Description of Artificial Sequence: Synthetic oligonucleotide"
agucuagcucuacagcugug

SEQ ID NO: 971 - RNA, 20 nt, Artificial Sequence
  source: /note="Description of Artificial Sequence: Synthetic oligonucleotide"
uuugguggugucucuagugg

SEQ ID NO: 972 - RNA, 20 nt, Artificial Sequence
  source: /note="Description of Artificial Sequence: Synthetic oligonucleotide"
ggaaauccauaaguccuauu

SEQ ID NO: 973 - RNA, 20 nt, Artificial Sequence
  source: /note="Description of Artificial Sequence: Synthetic oligonucleotide"
ccuauuuggugaaggagccc

SEQ ID NO: 974 - RNA, 20 nt, Artificial Sequence
  source: /note="Description of Artificial Sequence: Synthetic oligonucleotide"
uuggugaaggagcccaggac

SEQ ID NO: 975 - RNA, 20 nt, Artificial Sequence
  source: /note="Description of Artificial Sequence: Synthetic oligonucleotide"
uggugaaggagcccaggacu

SEQ ID NO: 976 - RNA, 20 nt, Artificial Sequence
  source: /note="Description of Artificial Sequence: Synthetic oligonucleotide"
gggcccagucuugcacagcc

SEQ ID NO: 977 - RNA, 20 nt, Artificial Sequence
  source: /note="Description of Artificial Sequence: Synthetic oligonucleotide"
guaaaggcucgugcaaagcc

SEQ ID NO: 978 - RNA, 20 nt, Artificial Sequence
  source: /note="Description of Artificial Sequence: Synthetic oligonucleotide"
gcuuugcacgagccuuuaca

SEQ ID NO: 979 - RNA, 20 nt, Artificial Sequence
  source: /note="Description of Artificial Sequence: Synthetic oligonucleotide"
ggaauggagagugucugaac

SEQ ID NO: 980 - RNA, 20 nt, Artificial Sequence
  source: /note="Description of Artificial Sequence: Synthetic oligonucleotide"
gaacaggggguaucgccccu

SEQ ID NO: 981 - RNA, 20 nt, Artificial Sequence
  source: /note="Description of Artificial Sequence: Synthetic oligonucleotide"
gguaucgccccugggacugc

SEQ ID NO: 982 - RNA, 20 nt, Artificial Sequence
  source: /note="Description of Artificial Sequence: Synthetic oligonucleotide"
aucgccccugggacugcugg

SEQ ID NO: 983 - RNA, 20 nt, Artificial Sequence
  source: /note="Description of Artificial Sequence: Synthetic oligonucleotide"
ggaauaguaccgaaggggcc

SEQ ID NO: 984 - RNA, 20 nt, Artificial Sequence
  source: /note="Description of Artificial Sequence: Synthetic oligonucleotide"
aggaauaguaccgaaggggc

SEQ ID NO: 985 - RNA, 20 nt, Artificial Sequence
  source: /note="Description of Artificial Sequence: Synthetic oligonucleotide"
gcaaguaggaauaguaccga

SEQ ID NO: 986 - RNA, 20 nt, Artificial Sequence
  source: /note="Description of Artificial Sequence: Synthetic oligonucleotide"
uauuccuacuugcagcugcu

SEQ ID NO: 987 - RNA, 20 nt, Artificial Sequence
  source: /note="Description of Artificial Sequence: Synthetic oligonucleotide"
cccagaguacagaucuaggu

SEQ ID NO: 988 - RNA, 20 nt, Artificial Sequence
  source: /note="Description of Artificial Sequence: Synthetic oligonucleotide"
uccuaccuagaucuguacuc

SEQ ID NO: 989 - RNA, 20 nt, Artificial Sequence
  source: /note="Description of Artificial Sequence: Synthetic oligonucleotide"
ccuaccuagaucuguacucu

SEQ ID NO: 990 - RNA, 20 nt, Artificial Sequence
  source: /note="Description of Artificial Sequence: Synthetic oligonucleotide"
cuucaagugggcuugugagu

SEQ ID NO: 991 - RNA, 20 nt, Artificial Sequence
  source: /note="Description of Artificial Sequence: Synthetic oligonucleotide"
ccuucaagugggcuugugag

SEQ ID NO: 992 - RNA, 20 nt, Artificial Sequence
  source: /note="Description of Artificial Sequence: Synthetic oligonucleotide"
ccacucacaagcccacuuga

SEQ ID NO: 993 - RNA, 20 nt, Artificial Sequence
  source: /note="Description of Artificial Sequence: Synthetic oligonucleotide"
cucaugaaugcccuucaagu

SEQ ID NO: 994 - RNA, 20 nt, Artificial Sequence
  source: /note="Description of Artificial Sequence: Synthetic oligonucleotide"
cacucacaagcccacuugaa

SEQ ID NO: 995 - RNA, 20 nt, Artificial Sequence
  source: /note="Description of Artificial Sequence: Synthetic oligonucleotide"
gcucaugaaugcccuucaag

SEQ ID NO: 996 - RNA, 20 nt, Artificial Sequence
  source: /note="Description of Artificial Sequence: Synthetic oligonucleotide"
gggcauucaugagccugcaa

SEQ ID NO: 997 - RNA, 20 nt, Artificial Sequence
  source: /note="Description of Artificial Sequence: Synthetic oligonucleotide"
uucaugagccugcaaagggg

SEQ ID NO: 998 - RNA, 20 nt, Artificial Sequence
  source: /note="Description of Artificial Sequence: Synthetic oligonucleotide"
uagcagaagcaagaagccug

SEQ ID NO: 999 - RNA, 20 nt, Artificial Sequence
  source: /note="Description of Artificial Sequence: Synthetic oligonucleotide"
acgugggugagcugagugcc

SEQ ID NO: 1000 - RNA, 20 nt, Artificial Sequence
  source: /note="Description of Artificial Sequence: Synthetic oligonucleotide"
gcacucagcucacccacguc

SEQ ID NO: 1001 - RNA, 20 nt, Artificial Sequence
  source: /note="Description of Artificial Sequence: Synthetic oligonucleotide"
agacacuacaagccagacgu

SEQ ID NO: 1002 - RNA, 20 nt, Artificial Sequence
  source: /note="Description of Artificial Sequence: Synthetic oligonucleotide"
cgucuggcuuguagugucuc

SEQ ID NO: 1003 - RNA, 20 nt, Artificial Sequence
  source: /note="Description of Artificial Sequence: Synthetic oligonucleotide"
ggguauaaggaaucagccua

SEQ ID NO: 1004 - RNA, 20 nt, Artificial Sequence
  source: /note="Description of Artificial Sequence: Synthetic oligonucleotide"
accuggcuccucucauccgu

SEQ ID NO: 1005 - RNA, 20 nt, Artificial Sequence
  source: /note="Description of Artificial Sequence: Synthetic oligonucleotide"
ggaaucagccuacggaugag

SEQ ID NO: 1006 - RNA, 20 nt, Artificial Sequence
  source: /note="Description of Artificial Sequence: Synthetic oligonucleotide"
gccuacggaugagaggagcc

SEQ ID NO: 1007 - RNA, 20 nt, Artificial Sequence
  source: /note="Description of Artificial Sequence: Synthetic oligonucleotide"
ucccucccaaggacaaggcc

SEQ ID NO: 1008 - RNA, 20 nt, Artificial Sequence
  source: /note="Description of Artificial Sequence: Synthetic oligonucleotide"
gcaguuauucacugaaagac

SEQ ID NO: 1009 - RNA, 20 nt, Artificial Sequence
  source: /note="Description of Artificial Sequence: Synthetic oligonucleotide"
ucuuucagugaauaacugcg

SEQ ID NO: 1010 - RNA, 20 nt, Artificial Sequence
  source: /note="Description of Artificial Sequence: Synthetic oligonucleotide"
gugaauaacugcgaggcaga

SEQ ID NO: 1011 - RNA, 20 nt, Artificial Sequence
  source: /note="Description of Artificial Sequence: Synthetic oligonucleotide"
auaacugcgaggcagagggu

SEQ ID NO: 1012 - RNA, 20 nt, Artificial Sequence
  source: /note="Description of Artificial Sequence: Synthetic oligonucleotide"
guuggcgguuagggagugau

SEQ ID NO: 1013 - RNA, 20 nt, Artificial Sequence
  source: /note="Description of Artificial Sequence: Synthetic oligonucleotide"
uuggcgguuagggagugauu

SEQ ID NO: 1014 - RNA, 20 nt, Artificial Sequence
  source: /note="Description of Artificial Sequence: Synthetic oligonucleotide"
aguaaggauaugcaacauua

SEQ ID NO: 1015 - RNA, 20 nt, Artificial Sequence
  source: /note="Description of Artificial Sequence: Synthetic oligonucleotide"
ggauaugcaacauuagggcu

SEQ ID NO: 1016 - RNA, 20 nt, Artificial Sequence
  source: /note="Description of Artificial Sequence: Synthetic oligonucleotide"
gcaacauuagggcuaggucu

SEQ ID NO: 1017 - RNA, 20 nt, Artificial Sequence
  source: /note="Description of Artificial Sequence: Synthetic oligonucleotide"
uuagggcuaggucugggcac

SEQ ID NO: 1018 - RNA, 20 nt, Artificial Sequence
  source: /note="Description of Artificial Sequence: Synthetic oligonucleotide"
ccugcccacuuagggagagg

SEQ ID NO: 1019 - RNA, 20 nt, Artificial Sequence
  source: /note="Description of Artificial Sequence: Synthetic oligonucleotide"
cgcccccuccugcccacuua

SEQ ID NO: 1020 - RNA, 20 nt, Artificial Sequence
  source: /note="Description of Artificial Sequence: Synthetic oligonucleotide"
ucucccuaagugggcaggag

SEQ ID NO: 1021 - RNA, 20 nt, Artificial Sequence
  source: /note="Description of Artificial Sequence: Synthetic oligonucleotide"
acauugccccgcccccaacc

SEQ ID NO: 1022 - RNA, 20 nt, Artificial Sequence
  source: /note="Description of Artificial Sequence: Synthetic oligonucleotide"
cccagcuguuccuugacagu

SEQ ID NO: 1023 - RNA, 20 nt, Artificial Sequence
  source: /note="Description of Artificial Sequence: Synthetic oligonucleotide"
cuagccccacccaacuguca

SEQ ID NO: 1024 - RNA, 20 nt, Artificial Sequence
  source: /note="Description of Artificial Sequence: Synthetic oligonucleotide"
cccaacugucaaggaacagc

SEQ ID NO: 1025 - RNA, 20 nt, Artificial Sequence
  source: /note="Description of Artificial Sequence: Synthetic oligonucleotide"
cggugauugaaauguguugc

SEQ ID NO: 1026 - RNA, 20 nt, Artificial Sequence
  source: /note="Description of Artificial Sequence: Synthetic oligonucleotide"
ccuagggaaccccacaaggc

SEQ ID NO: 1027 - RNA, 20 nt, Artificial Sequence
  source: /note="Description of Artificial Sequence: Synthetic oligonucleotide"
gaaauguguugccggccuug

SEQ ID NO: 1028 - RNA, 20 nt, Artificial Sequence
  source: /note="Description of Artificial Sequence: Synthetic oligonucleotide"
aaauguguugccggccuugu

SEQ ID NO: 1029 - RNA, 20 nt, Artificial Sequence
  source: /note="Description of Artificial Sequence: Synthetic oligonucleotide"
ccggccuugugggguucccu

SEQ ID NO: 1030 - RNA, 20 nt, Artificial Sequence
  source: /note="Description of Artificial Sequence: Synthetic oligonucleotide"
ggugccguuccgcagaccua

SEQ ID NO: 1031 - RNA, 20 nt, Artificial Sequence
  source: /note="Description of Artificial Sequence: Synthetic oligonucleotide"
cggugccguuccgcagaccu

SEQ ID NO: 1032 - RNA, 20 nt, Artificial Sequence
  source: /note="Description of Artificial Sequence: Synthetic oligonucleotide"
ggucugcggaacggcaccgu

SEQ ID NO: 1033 - RNA, 20 nt, Artificial Sequence
  source: /note="Description of Artificial Sequence: Synthetic oligonucleotide"
gucugcggaacggcaccguc

SEQ ID NO: 1034 - RNA, 20 nt, Artificial Sequence
  source: /note="Description of Artificial Sequence: Synthetic oligonucleotide"
ucugcggaacggcaccgucg

SEQ ID NO: 1035 - RNA, 20 nt, Artificial Sequence
  source: /note="Description of Artificial Sequence: Synthetic oligonucleotide"
cugcggaacggcaccgucgg

SEQ ID NO: 1036 - RNA, 20 nt, Artificial Sequence
  source: /note="Description of Artificial Sequence: Synthetic oligonucleotide"
guuauccaaccgucccccga

SEQ ID NO: 1037 - RNA, 20 nt, Artificial Sequence
  source: /note="Description of Artificial Sequence: Synthetic oligonucleotide"
ggaacggcaccgucggggga

SEQ ID NO: 1038 - RNA, 20 nt, Artificial Sequence
  source: /note="Description of Artificial Sequence: Synthetic oligonucleotide"
cggcaccgucgggggacggu

SEQ ID NO: 1039 - RNA, 20 nt, Artificial Sequence
  source: /note="Description of Artificial Sequence: Synthetic oligonucleotide"
ucgggggacgguuggauaac

SEQ ID NO: 1040 - RNA, 20 nt, Artificial Sequence
  source: /note="Description of Artificial Sequence: Synthetic oligonucleotide"
guuggauaacaggaugauac

SEQ ID NO: 1041 - RNA, 20 nt, Artificial Sequence
  source: /note="Description of Artificial Sequence: Synthetic oligonucleotide"
ugauacuggagggauucuug

SEQ ID NO: 1042 - RNA, 20 nt, Artificial Sequence
  source: /note="Description of Artificial Sequence: Synthetic oligonucleotide"
acuggagggauucuuguggu

SEQ ID NO: 1043 - RNA, 20 nt, Artificial Sequence
  source: /note="Description of Artificial Sequence: Synthetic oligonucleotide"
gauucuugugguuggagauc

SEQ ID NO: 1044 - RNA, 20 nt, Artificial Sequence
  source: /note="Description of Artificial Sequence: Synthetic oligonucleotide"
uuggagaucagguguuuucc

SEQ ID NO: 1045 - RNA, 20 nt, Artificial Sequence
  source: /note="Description of Artificial Sequence: Synthetic oligonucleotide"
caucuccgagucggggaucc

SEQ ID NO: 1046 - RNA, 20 nt, Artificial Sequence
  source: /note="Description of Artificial Sequence: Synthetic oligonucleotide"
guuuuccaggauccccgacu

SEQ ID NO: 1047 - RNA, 20 nt, Artificial Sequence
  source: /note="Description of Artificial Sequence: Synthetic oligonucleotide"
aagucuccaucuccgagucg

SEQ ID NO: 1048 - RNA, 20 nt, Artificial Sequence
  source: /note="Description of Artificial Sequence: Synthetic oligonucleotide"
aaagucuccaucuccgaguc

SEQ ID NO: 1049 - RNA, 20 nt, Artificial Sequence
  source: /note="Description of Artificial Sequence: Synthetic oligonucleotide"
gaaagucuccaucuccgagu

SEQ ID NO: 1050 - RNA, 20 nt, Artificial Sequence
  source: /note="Description of Artificial Sequence: Synthetic oligonucleotide"
caggauccccgacucggaga

SEQ ID NO: 1051 - RNA, 20 nt, Artificial Sequence
  source: /note="Description of Artificial Sequence: Synthetic oligonucleotide"
gagauggagacuuuccggaa

SEQ ID NO: 1052 - RNA, 20 nt, Artificial Sequence
  source: /note="Description of Artificial Sequence: Synthetic oligonucleotide"
agauggagacuuuccggaaa

SEQ ID NO: 1053 - RNA, 20 nt, Artificial Sequence
  source: /note="Description of Artificial Sequence: Synthetic oligonucleotide"
gagacuuuccggaaagggaa

SEQ ID NO: 1054 - RNA, 20 nt, Artificial Sequence
  source: /note="Description of Artificial Sequence: Synthetic oligonucleotide"
agacuuuccggaaagggaau

SEQ ID NO: 1055 - RNA, 20 nt, Artificial Sequence
  source: /note="Description of Artificial Sequence: Synthetic oligonucleotide"
gacuuuccggaaagggaaug

SEQ ID NO: 1056 - RNA, 20 nt, Artificial Sequence
  source: /note="Description of Artificial Sequence: Synthetic oligonucleotide"
uuccggaaagggaauggggc

SEQ ID NO: 1057 - RNA, 20 nt, Artificial Sequence
  source: /note="Description of Artificial Sequence: Synthetic oligonucleotide"
gcggagcuaggaccugcccu

SEQ ID NO: 1058 - RNA, 20 nt, Artificial Sequence
  source: /note="Description of Artificial Sequence: Synthetic oligonucleotide"
gagccccgacgggcggagcu

SEQ ID NO: 1059 - RNA, 20 nt, Artificial Sequence
  source: /note="Description of Artificial Sequence: Synthetic oligonucleotide"
cagguccuagcuccgcccgu

SEQ ID NO: 1060 - RNA, 20 nt, Artificial Sequence
  source: /note="Description of Artificial Sequence: Synthetic oligonucleotide"
agguccuagcuccgcccguc

SEQ ID NO: 1061 - RNA, 20 nt, Artificial Sequence
  source: /note="Description of Artificial Sequence: Synthetic oligonucleotide"
cucuuaagagccccgacggg

SEQ ID NO: 1062 - RNA, 20 nt, Artificial Sequence
  source: /note="Description of Artificial Sequence: Synthetic oligonucleotide"
gguccuagcuccgcccgucg

SEQ ID NO: 1063 - RNA, 20 nt, Artificial Sequence
  source: /note="Description of Artificial Sequence: Synthetic oligonucleotide"
aaacucuuaagagccccgac

SEQ ID NO: 1064 - RNA, 20 nt, Artificial Sequence
  source: /note="Description of Artificial Sequence: Synthetic oligonucleotide"
gaguuuugacguuguuuaag

SEQ ID NO: 1065 - RNA, 20 nt, Artificial Sequence
  source: /note="Description of Artificial Sequence: Synthetic oligonucleotide"
ucccuaggaugggaaucuuc

SEQ ID NO: 1066 - RNA, 20 nt, Artificial Sequence
  source: /note="Description of Artificial Sequence: Synthetic oligonucleotide"
ggccggaagauucccauccu

SEQ ID NO: 1067 - RNA, 20 nt, Artificial Sequence
  source: /note="Description of Artificial Sequence: Synthetic oligonucleotide"
gacaucucuaucccuaggau

SEQ ID NO: 1068 - RNA, 20 nt, Artificial Sequence
  source: /note="Description of Artificial Sequence: Synthetic oligonucleotide"
gccggaagauucccauccua

SEQ ID NO: 1069 - RNA, 20 nt, Artificial Sequence
  source: /note="Description of Artificial Sequence: Synthetic oligonucleotide"
auccuagggauagagauguc

SEQ ID NO: 1070 - RNA, 20 nt, Artificial Sequence
  source: /note="Description of Artificial Sequence: Synthetic oligonucleotide"
uccuagggauagagaugucc

SEQ ID NO: 1071 - RNA, 20 nt, Artificial Sequence
  source: /note="Description of Artificial Sequence: Synthetic oligonucleotide"
ccuagggauagagauguccg

SEQ ID NO: 1072 - RNA, 20 nt, Artificial Sequence
  source: /note="Description of Artificial Sequence: Synthetic oligonucleotide"
ggauagagauguccggggac

SEQ ID NO: 1073 - RNA, 20 nt, Artificial Sequence
  source: /note="Description of Artificial Sequence: Synthetic oligonucleotide"
gauagagauguccggggacu

SEQ ID NO: 1074 - RNA, 20 nt, Artificial Sequence
  source: /note="Description of Artificial Sequence: Synthetic oligonucleotide"
agauguccggggacugggcu

SEQ ID NO: 1075 - RNA, 20 nt, Artificial Sequence
  source: /note="Description of Artificial Sequence: Synthetic oligonucleotide"
gauguccggggacugggcug

SEQ ID NO: 1076 - RNA, 20 nt, Artificial Sequence
  source: /note="Description of Artificial Sequence: Synthetic oligonucleotide"
cuagcggaugcacccacgcu

SEQ ID NO: 1077 - RNA, 20 nt, Artificial Sequence
  source: /note="Description of Artificial Sequence: Synthetic oligonucleotide"
gcuagcggaugcacccacgc

SEQ ID NO: 1078 - RNA, 20 nt, Artificial Sequence
  source: /note="Description of Artificial Sequence: Synthetic oligonucleotide"
cgugggugcauccgcuagcc

SEQ ID NO: 1079 - RNA, 20 nt, Artificial Sequence
  source: /note="Description of Artificial Sequence: Synthetic oligonucleotide"
uugucgcgcgcccuggcuag

SEQ ID NO: 1080 - RNA, 20 nt, Artificial Sequence
  source: /note="Description of Artificial Sequence: Synthetic oligonucleotide"
gugggugcauccgcuagcca

SEQ ID NO: 1081 - RNA, 20 nt, Artificial Sequence
  source: /note="Description of Artificial Sequence: Synthetic oligonucleotide"
uggaagcuugucgcgcgccc

SEQ ID NO: 1082 - RNA, 20 nt, Artificial Sequence
  source: /note="Description of Artificial Sequence: Synthetic oligonucleotide"
agcugcagccguccgcccuc

SEQ ID NO: 1083 - RNA, 20 nt, Artificial Sequence
  source: /note="Description of Artificial Sequence: Synthetic oligonucleotide"
gcugcagccguccgcccuca

SEQ ID NO: 1084 - RNA, 20 nt, Artificial Sequence
  source: /note="Description of Artificial Sequence: Synthetic oligonucleotide"
accguucgucugggcccuga

SEQ ID NO: 1085 - RNA, 20 nt, Artificial Sequence
  source: /note="Description of Artificial Sequence: Synthetic oligonucleotide"
aaccguucgucugggcccug

SEQ ID NO: 1086 - RNA, 20 nt, Artificial Sequence
  source: /note="Description of Artificial Sequence: Synthetic oligonucleotide"
acgagcgaaaccguucgucu

SEQ ID NO: 1087 - RNA, 20 nt, Artificial Sequence
  source: /note="Description of Artificial Sequence: Synthetic oligonucleotide"
cacgagcgaaaccguucguc

SEQ ID NO: 1088 - RNA, 20 nt, Artificial Sequence
  source: /note="Description of Artificial Sequence: Synthetic oligonucleotide"
gcccucagggcccagacgaa

SEQ ID NO: 1089 - RNA, 20 nt, Artificial Sequence
  source: /note="Description of Artificial Sequence: Synthetic oligonucleotide"
cagacgaacgguuucgcucg

SEQ ID NO: 1090 - RNA, 20 nt, Artificial Sequence
  source: /note="Description of Artificial Sequence: Synthetic oligonucleotide"
acgguuucgcucguggcacu

SEQ ID NO: 1091 - RNA, 20 nt, Artificial Sequence
  source: /note="Description of Artificial Sequence: Synthetic oligonucleotide"
cgcucguggcacucggcgcu

SEQ ID NO: 1092 - RNA, 20 nt, Artificial Sequence
  source: /note="Description of Artificial Sequence: Synthetic oligonucleotide"
cggcacucggcaggccaacc

SEQ ID NO: 1093 - RNA, 20 nt, Artificial Sequence
  source: /note="Description of Artificial Sequence: Synthetic oligonucleotide"
cccucagggcgcgcccaggu

SEQ ID NO: 1094 - RNA, 20 nt, Artificial Sequence
  source: /note="Description of Artificial Sequence: Synthetic oligonucleotide"
gccaaccugggcgcgcccug

SEQ ID NO: 1095 - RNA, 20 nt, Artificial Sequence
  source: /note="Description of Artificial Sequence: Synthetic oligonucleotide"
ccaaccugggcgcgcccuga

SEQ ID NO: 1096 - RNA, 20 nt, Artificial Sequence
  source: /note="Description of Artificial Sequence: Synthetic oligonucleotide"
caaccugggcgcgcccugag

SEQ ID NO: 1097 - RNA, 20 nt, Artificial Sequence
  source: /note="Description of Artificial Sequence: Synthetic oligonucleotide"
cgcucagcugcucccgccug

SEQ ID NO: 1098 - RNA, 20 nt, Artificial Sequence
  source: /note="Description of Artificial Sequence: Synthetic oligonucleotide"
uggcuccggcgcacgcgggg

SEQ ID NO: 1099 - RNA, 20 nt, Artificial Sequence
  source: /note="Description of Artificial Sequence: Synthetic oligonucleotide"
ucuuggcuccggcgcacgcg

SEQ ID NO: 1100 - RNA, 20 nt, Artificial Sequence
  source: /note="Description of Artificial Sequence: Synthetic oligonucleotide"
aucuuggcuccggcgcacgc

SEQ ID NO: 1101 - RNA, 20 nt, Artificial Sequence
  source: /note="Description of Artificial Sequence: Synthetic oligonucleotide"
caucuuggcuccggcgcacg

SEQ ID NO: 1102 - RNA, 20 nt, Artificial Sequence
  source: /note="Description of Artificial Sequence: Synthetic oligonucleotide"
cgcgugcgccggagccaaga

SEQ ID NO: 1103 - RNA, 20 nt, Artificial Sequence
  source: /note="Description of Artificial Sequence: Synthetic oligonucleotide"
ugucacucggcacugggcgg

SEQ ID NO: 1104 - RNA, 20 nt, Artificial Sequence
  source: /note="Description of Artificial Sequence: Synthetic oligonucleotide"
uuuugucacucggcacuggg

SEQ ID NO: 1105 - RNA, 20 nt, Artificial Sequence
  source: /note="Description of Artificial Sequence: Synthetic oligonucleotide"
ccgcuuuugucacucggcac

SEQ ID NO: 1106 - RNA, 20 nt, Artificial Sequence
  source: /note="Description of Artificial Sequence: Synthetic oligonucleotide"
ugcucuccgcuuuugucacu

SEQ ID NO: 1107 - RNA, 20 nt, Artificial Sequence
  source: /note="Description of Artificial Sequence: Synthetic oligonucleotide"
ucggccuugggcccgucccg

SEQ ID NO: 1108 - RNA, 20 nt, Artificial Sequence
  source: /note="Description of Artificial Sequence: Synthetic oligonucleotide"
gcucuuaccgggcgcgggag

SEQ ID NO: 1109 - RNA, 20 nt, Artificial Sequence
  source: /note="Description of Artificial Sequence: Synthetic oligonucleotide"
cccaagcgcgggcucuuacc

SEQ ID NO: 1110 - RNA, 20 nt, Artificial Sequence
  source: /note="Description of Artificial Sequence: Synthetic oligonucleotide"
ucccaagcgcgggcucuuac

SEQ ID NO: 1111 - RNA, 20 nt, Artificial Sequence
  source: /note="Description of Artificial Sequence: Synthetic oligonucleotide"
gcccgguaagagcccgcgcu

SEQ ID NO: 1112 - RNA, 20 nt, Artificial Sequence
  source: /note="Description of Artificial Sequence: Synthetic oligonucleotide"
cccgguaagagcccgcgcuu

SEQ ID NO: 1113 - RNA, 20 nt, Artificial Sequence
  source: /note="Description of Artificial Sequence: Synthetic oligonucleotide"
uccccacacccucccaagcg

SEQ ID NO: 1114 - RNA, 20 nt, Artificial Sequence
  source: /note="Description of Artificial Sequence: Synthetic oligonucleotide"
gguaagagcccgcgcuuggg

SEQ ID NO: 1115 - RNA, 20 nt, Artificial Sequence
  source: /note="Description of Artificial Sequence: Synthetic oligonucleotide"
guaagagcccgcgcuuggga

SEQ ID NO: 1116 - RNA, 20 nt, Artificial Sequence
  source: /note="Description of Artificial Sequence: Synthetic oligonucleotide"
agcccgcgcuugggagggug

SEQ ID NO: 1117 - RNA, 20 nt, Artificial Sequence
  source: /note="Description of Artificial Sequence: Synthetic oligonucleotide"
gcccgcgcuugggagggugu

SEQ ID NO: 1118 - RNA, 20 nt, Artificial Sequence
  source: /note="Description of Artificial Sequence: Synthetic oligonucleotide"
aaggucggaaucccgccugc

SEQ ID NO: 1119 - RNA, 20 nt, Artificial Sequence
  source: /note="Description of Artificial Sequence: Synthetic oligonucleotide"
acggaaggcgucgggggcgg

SEQ ID NO: 1120 - RNA, 20 nt, Artificial Sequence
  source: /note="Description of Artificial Sequence: Synthetic oligonucleotide"
uggacggaaggcgucggggg

SEQ ID NO: 1121 - RNA, 20 nt, Artificial Sequence
  source: /note="Description of Artificial Sequence: Synthetic oligonucleotide"
gacuggacggaaggcgucgg

SEQ ID NO: 1122 - RNA, 20 nt, Artificial Sequence
  source: /note="Description of Artificial Sequence: Synthetic oligonucleotide"
agacuggacggaaggcgucg

SEQ ID NO: 1123 - RNA, 20 nt, Artificial Sequence
  source: /note="Description of Artificial Sequence: Synthetic oligonucleotide"
cagacuggacggaaggcguc

SEQ ID NO: 1124 - RNA, 20 nt, Artificial Sequence
  source: /note="Description of Artificial Sequence: Synthetic oligonucleotide"
ggucccgcagacuggacgga

SEQ ID NO: 1125 - RNA, 20 nt, Artificial Sequence
  source: /note="Description of Artificial Sequence: Synthetic oligonucleotide"
gacgccuuccguccagucug

SEQ ID NO: 1126 - RNA, 20 nt, Artificial Sequence
  source: /note="Description of Artificial Sequence: Synthetic oligonucleotide"
acgccuuccguccagucugc

SEQ ID NO: 1127 - RNA, 20 nt, Artificial Sequence
  source: /note="Description of Artificial Sequence: Synthetic oligonucleotide"
aacuaaagggccugggggag

SEQ ID NO: 1128 - RNA, 20 nt, Artificial Sequence
  source: /note="Description of Artificial Sequence: Synthetic oligonucleotide"
cacacaacuaaagggccugg

SEQ ID NO: 1129 - RNA, 20 nt, Artificial Sequence
  source: /note="Description of Artificial Sequence: Synthetic oligonucleotide"
ccacacaacuaaagggccug

SEQ ID NO: 1130 - RNA, 20 nt, Artificial Sequence
  source: /note="Description of Artificial Sequence: Synthetic oligonucleotide"
ccugggcccacacaacuaaa

SEQ ID NO: 1131 - RNA, 20 nt, Artificial Sequence
  source: /note="Description of Artificial Sequence: Synthetic oligonucleotide"
cccuuuaguugugugggccc

SEQ ID NO: 1132 - RNA, 20 nt, Artificial Sequence
  source: /note="Description of Artificial Sequence: Synthetic oligonucleotide"
gagcggcgacagaaggcccu

SEQ ID NO: 1133 - RNA, 20 nt, Artificial Sequence
  source: /note="Description of Artificial Sequence: Synthetic oligonucleotide"
cgagcggcgacagaaggccc

SEQ ID NO: 1134 - RNA, 20 nt, Artificial Sequence
  source: /note="Description of Artificial Sequence: Synthetic oligonucleotide"
ggccuucugucgccgcucgc

SEQ ID NO: 1135 - RNA, 20 nt, Artificial Sequence
  source: /note="Description of Artificial Sequence: Synthetic oligonucleotide"
gaggccugggacccugcgag

SEQ ID NO: 1136 - RNA, 20 nt, Artificial Sequence
  source: /note="Description of Artificial Sequence: Synthetic oligonucleotide"
gucgccgcucgcaggguccc

SEQ ID NO: 1137 - RNA, 20 nt, Artificial Sequence
  source: /note="Description of Artificial Sequence: Synthetic oligonucleotide"
aaggucucgaggagcggcgg

SEQ ID NO: 1138 - RNA, 20 nt, Artificial Sequence
  source: /note="Description of Artificial Sequence: Synthetic oligonucleotide"
gcaaaggucucgaggagcgg

SEQ ID NO: 1139 - RNA, 20 nt, Artificial Sequence
  source: /note="Description of Artificial Sequence: Synthetic oligonucleotide"
ggggcaaaggucucgaggag

SEQ ID NO: 1140 - RNA, 20 nt, Artificial Sequence
  source: /note="Description of Artificial Sequence: Synthetic oligonucleotide"
cagacggggcaaaggucucg

SEQ ID NO: 1141 - RNA, 20 nt, Artificial Sequence
  source: /note="Description of Artificial Sequence: Synthetic oligonucleotide"
acaucugucagacggggcaa

SEQ ID NO: 1142 - RNA, 20 nt, Artificial Sequence
  source: /note="Description of Artificial Sequence: Synthetic oligonucleotide"
caagggacaucugucagacg

SEQ ID NO: 1143 - RNA, 20 nt, Artificial Sequence
  source: /note="Description of Artificial Sequence: Synthetic oligonucleotide"
gcaagggacaucugucagac

SEQ ID NO: 1144 - RNA, 20 nt, Artificial Sequence
  source: /note="Description of Artificial Sequence: Synthetic oligonucleotide"
ggcaagggacaucugucaga

SEQ ID NO: 1145 - RNA, 20 nt, Artificial Sequence
  source: /note="Description of Artificial Sequence: Synthetic oligonucleotide"
ccggggcuccaaagggggca

SEQ ID NO: 1146 - RNA, 20 nt, Artificial Sequence
  source: /note="Description of Artificial Sequence: Synthetic oligonucleotide"
cagaugucccuugcccccuu

SEQ ID NO: 1147 - RNA, 20 nt, Artificial Sequence
  source: /note="Description of Artificial Sequence: Synthetic oligonucleotide"
acgcucccggggcuccaaag

SEQ ID NO: 1148 - RNA, 20 nt, Artificial Sequence
  source: /note="Description of Artificial Sequence: Synthetic oligonucleotide"
gacgcucccggggcuccaaa

SEQ ID NO: 1149 - RNA, 20 nt, Artificial Sequence
  source: /note="Description of Artificial Sequence: Synthetic oligonucleotide"
cguggcaagggacgcucccg

SEQ ID NO: 1150 - RNA, 20 nt, Artificial Sequence
  source: /note="Description of Artificial Sequence: Synthetic oligonucleotide"
ccguggcaagggacgcuccc

SEQ ID NO: 1151 - RNA, 20 nt, Artificial Sequence
  source: /note="Description of Artificial Sequence: Synthetic oligonucleotide"
accguggcaagggacgcucc

SEQ ID NO: 1152 - RNA, 20 nt, Artificial Sequence
  source: /note="Description of Artificial Sequence: Synthetic oligonucleotide"
acggaccggaaccguggcaa

SEQ ID NO: 1153 - RNA, 20 nt, Artificial Sequence
  source: /note="Description of Artificial Sequence: Synthetic oligonucleotide"
cccgggagcgucccuugcca

SEQ ID NO: 1154 - RNA, 20 nt, Artificial Sequence
  source: /note="Description of Artificial Sequence: Synthetic oligonucleotide"
gacggaccggaaccguggca

SEQ ID NO: 1155 - RNA, 20 nt, Artificial Sequence
  source: /note="Description of Artificial Sequence: Synthetic oligonucleotide"
caccggacggaccggaaccg

SEQ ID NO: 1156 - RNA, 20 nt, Artificial Sequence
  source: /note="Description of Artificial Sequence: Synthetic oligonucleotide"
aguuuccgcaccggacggac

SEQ ID NO: 1157 - RNA, 20 nt, Artificial Sequence
  source: /note="Description of Artificial Sequence: Synthetic oligonucleotide"
ugccacgguuccgguccguc

SEQ ID NO: 1158 - RNA, 20 nt, Artificial Sequence
  source: /note="Description of Artificial Sequence: Synthetic oligonucleotide"
aagugaguuuccgcaccgga

SEQ ID NO: 1159 - RNA, 20 nt, Artificial Sequence
  source: /note="Description of Artificial Sequence: Synthetic oligonucleotide"
cgguuccgguccguccggug

SEQ ID NO: 1160 - RNA, 20 nt, Artificial Sequence
  source: /note="Description of Artificial Sequence: Synthetic oligonucleotide"
gcugaagugaguuuccgcac

SEQ ID NO: 1161 - RNA, 20 nt, Artificial Sequence
  source: /note="Description of Artificial Sequence: Synthetic oligonucleotide"
cgcgucugucagauggggca

SEQ ID NO: 1162 - RNA, 20 nt, Artificial Sequence
  source: /note="Description of Artificial Sequence: Synthetic oligonucleotide"
gcgcgucugucagauggggc

SEQ ID NO: 1163 - RNA, 20 nt, Artificial Sequence
  source: /note="Description of Artificial Sequence: Synthetic oligonucleotide"
gugggcgcgucugucagaug

SEQ ID NO: 1164 - RNA, 20 nt, Artificial Sequence
  source: /note="Description of Artificial Sequence: Synthetic oligonucleotide"
ggugggcgcgucugucagau

SEQ ID NO: 1165 - RNA, 20 nt, Artificial Sequence
  source: /note="Description of Artificial Sequence: Synthetic oligonucleotide"
gggugggcgcgucugucaga

SEQ ID NO: 1166 - RNA, 20 nt, Artificial Sequence
  source: /note="Description of Artificial Sequence: Synthetic oligonucleotide"
ucaaagucuccgggucgggu

SEQ ID NO: 1167 - RNA, 20 nt, Artificial Sequence
  source: /note="Description of Artificial Sequence: Synthetic oligonucleotide"
gucaaagucuccgggucggg

SEQ ID NO: 1168 - RNA, 20 nt, Artificial Sequence
  source: /note="Description of Artificial Sequence: Synthetic oligonucleotide"
acagacgcgcccacccgacc

SEQ ID NO: 1169 - RNA, 20 nt, Artificial Sequence
  source: /note="Description of Artificial Sequence: Synthetic oligonucleotide"
uuugucaaagucuccggguc

SEQ ID NO: 1170 - RNA, 20 nt, Artificial Sequence
  source: /note="Description of Artificial Sequence: Synthetic oligonucleotide"
cuuugucaaagucuccgggu

SEQ ID NO: 1171 - RNA, 20 nt, Artificial Sequence
  source: /note="Description of Artificial Sequence: Synthetic oligonucleotide"
cgcugaggacuggggcaccg

SEQ ID NO: 1172 - RNA, 20 nt, Artificial Sequence
  source: /note="Description of Artificial Sequence: Synthetic oligonucleotide"
agaguaggcgcugaggacug

SEQ ID NO: 1173 - RNA, 20 nt, Artificial Sequence
  source: /note="Description of Artificial Sequence: Synthetic oligonucleotide"
aagaguaggcgcugaggacu

SEQ ID NO: 1174 - RNA, 20 nt, Artificial Sequence
  source: /note="Description of Artificial Sequence: Synthetic oligonucleotide"
gaagcaaagaguaggcgcug

SEQ ID NO: 1175 - RNA, 20 nt, Artificial Sequence
  source: /note="Description of Artificial Sequence: Synthetic oligonucleotide"
aacugagcauagaaccuaca

SEQ ID NO: 1176 - RNA, 20 nt, Artificial Sequence
  source: /note="Description of Artificial Sequence: Synthetic oligonucleotide"
aacggggcagggggccaugu

SEQ ID NO: 1177 - RNA, 20 nt, Artificial Sequence
  source: /note="Description of Artificial Sequence: Synthetic oligonucleotide"
gugggauguaacggggcagg

SEQ ID NO: 1178 - RNA, 20 nt, Artificial Sequence
  source: /note="Description of Artificial Sequence: Synthetic oligonucleotide"
gcguucagugggauguaacg

SEQ ID NO: 1179 - RNA, 20 nt, Artificial Sequence
  source: /note="Description of Artificial Sequence: Synthetic oligonucleotide"
ggcguucagugggauguaac

SEQ ID NO: 1180 - RNA, 20 nt, Artificial Sequence
  source: /note="Description of Artificial Sequence: Synthetic oligonucleotide"
ugugccaaauggggccuugg

SEQ ID NO: 1181 - RNA, 20 nt, Artificial Sequence
  source: /note="Description of Artificial Sequence: Synthetic oligonucleotide"
aacugugccaaauggggccu

SEQ ID NO: 1182 - RNA, 20 nt, Artificial Sequence
  source: /note="Description of Artificial Sequence: Synthetic oligonucleotide"
aacgccuccaaggccccauu

SEQ ID NO: 1183 - RNA, 20 nt, Artificial Sequence
  source: /note="Description of Artificial Sequence: Synthetic oligonucleotide"
ugaaggaacugugccaaaug

SEQ ID NO: 1184 - RNA, 20 nt, Artificial Sequence
  source: /note="Description of Artificial Sequence: Synthetic oligonucleotide"
gaugaaggaacugugccaaa

SEQ ID NO: 1185 - RNA, 20 nt, Artificial Sequence
  source: /note="Description of Artificial Sequence: Synthetic oligonucleotide"
gaguucagagcaaaggauga

SEQ ID NO: 1186 - RNA, 20 nt, Artificial Sequence
  source: /note="Description of Artificial Sequence: Synthetic oligonucleotide"
cucuaaauuuggaguucaac

SEQ ID NO: 1187 - RNA, 20 nt, Artificial Sequence
  source: /note="Description of Artificial Sequence: Synthetic oligonucleotide"
uggaguucaacuggccuccc

SEQ ID NO: 1188 - RNA, 20 nt, Artificial Sequence
  source: /note="Description of Artificial Sequence: Synthetic oligonucleotide"
ucacgucuaguuguucaaag

SEQ ID NO: 1189 - RNA, 20 nt, Artificial Sequence
  source: /note="Description of Artificial Sequence: Synthetic oligonucleotide"
uuucacgucuaguuguucaa

SEQ ID NO: 1190 - RNA, 20 nt, Artificial Sequence
  source: /note="Description of Artificial Sequence: Synthetic oligonucleotide"
aucaggcccgcagcaucccu

SEQ ID NO: 1191 - RNA, 20 nt, Artificial Sequence
  source: /note="Description of Artificial Sequence: Synthetic oligonucleotide"
uaucaggcccgcagcauccc

SEQ ID NO: 1192 - RNA, 20 nt, Artificial Sequence
  source: /note="Description of Artificial Sequence: Synthetic oligonucleotide"
ugacuucggacagaaagagu

SEQ ID NO: 1193 - RNA, 20 nt, Artificial Sequence
  source: /note="Description of Artificial Sequence: Synthetic oligonucleotide"
guccgaagucagauagcugu

SEQ ID NO: 1194 - RNA, 20 nt, Artificial Sequence
  source: /note="Description of Artificial Sequence: Synthetic oligonucleotide"
cacaagcugggcccuaagug

SEQ ID NO: 1195 - RNA, 20 nt, Artificial Sequence
  source: /note="Description of Artificial Sequence: Synthetic oligonucleotide"
ucacaagcugggcccuaagu

SEQ ID NO: 1196 - RNA, 20 nt, Artificial Sequence
  source: /note="Description of Artificial Sequence: Synthetic oligonucleotide"
aucacaagcugggcccuaag

SEQ ID NO: 1197 - RNA, 20 nt, Artificial Sequence
  source: /note="Description of Artificial Sequence: Synthetic oligonucleotide"
uggccuacugaucacaagcu

SEQ ID NO: 1198 - RNA, 20 nt, Artificial Sequence
  source: /note="Description of Artificial Sequence: Synthetic oligonucleotide"
guggccuacugaucacaagc

SEQ ID NO: 1199 - RNA, 20 nt, Artificial Sequence
  source: /note="Description of Artificial Sequence: Synthetic oligonucleotide"
gggcccagcuugugaucagu

SEQ ID NO: 1200 - RNA, 20 nt, Artificial Sequence
  source: /note="Description of Artificial Sequence: Synthetic oligonucleotide"
ugugaucaguaggccacccc

SEQ ID NO: 1201 - RNA, 20 nt, Artificial Sequence
  source: /note="Description of Artificial Sequence: Synthetic oligonucleotide"
ucuccaccagacaagacagc

SEQ ID NO: 1202 - RNA, 20 nt, Artificial Sequence
  source: /note="Description of Artificial Sequence: Synthetic oligonucleotide"
aacacaacaccagggucagg

SEQ ID NO: 1203 - RNA, 20 nt, Artificial Sequence
  source: /note="Description of Artificial Sequence: Synthetic oligonucleotide"
uucaacacaacaccaggguc

SEQ ID NO: 1204 - RNA, 20 nt, Artificial Sequence
  source: /note="Description of Artificial Sequence: Synthetic oligonucleotide"
agggaauucaacacaacacc

SEQ ID NO: 1205 - RNA, 20 nt, Artificial Sequence
  source: /note="Description of Artificial Sequence: Synthetic oligonucleotide"
ucugccugucucgaggguga

SEQ ID NO: 1206 - RNA, 20 nt, Artificial Sequence
  source: /note="Description of Artificial Sequence: Synthetic oligonucleotide"
ggaacgucugccugucucga

SEQ ID NO: 1207 - RNA, 20 nt, Artificial Sequence
  source: /note="Description of Artificial Sequence: Synthetic oligonucleotide"
gggaacgucugccugucucg

SEQ ID NO: 1208 - RNA, 20 nt, Artificial Sequence
  source: /note="Description of Artificial Sequence: Synthetic oligonucleotide"
ucugggcagaacuugugagg

SEQ ID NO: 1209 - RNA, 20 nt, Artificial Sequence
  source: /note="Description of Artificial Sequence: Synthetic oligonucleotide"
ucucugggcagaacuuguga

SEQ ID NO: 1210 - RNA, 20 nt, Artificial Sequence
  source: /note="Description of Artificial Sequence: Synthetic oligonucleotide"
cucucugggcagaacuugug

SEQ ID NO: 1211 - RNA, 20 nt, Artificial Sequence
  source: /note="Description of Artificial Sequence: Synthetic oligonucleotide"
ucucaaagaaaagaucucuc

SEQ ID NO: 1212 - RNA, 20 nt, Artificial Sequence
  source: /note="Description of Artificial Sequence: Synthetic oligonucleotide"
cuacagcauggacaggucug

SEQ ID NO: 1213 - RNA, 20 nt, Artificial Sequence
  source: /note="Description of Artificial Sequence: Synthetic oligonucleotide"
cacuacagcauggacagguc

SEQ ID NO: 1214 - RNA, 20 nt, Artificial Sequence
  source: /note="Description of Artificial Sequence: Synthetic oligonucleotide"
ucugcgaagcgacucacccc

SEQ ID NO: 1215 - RNA, 20 nt, Artificial Sequence
  source: /note="Description of Artificial Sequence: Synthetic oligonucleotide"
gucgcuucgcagagugagag

SEQ ID NO: 1216 - RNA, 20 nt, Artificial Sequence
  source: /note="Description of Artificial Sequence: Synthetic oligonucleotide"
gagagcggacaucaaggaua

SEQ ID NO: 1217 - RNA, 20 nt, Artificial Sequence
  source: /note="Description of Artificial Sequence: Synthetic oligonucleotide"
uauacccagaacuaagaaga

SEQ ID NO: 1218 - RNA, 20 nt, Artificial Sequence
  source: /note="Description of Artificial Sequence: Synthetic oligonucleotide"
caggcucuucuuagggagcg

SEQ ID NO: 1219 - RNA, 20 nt, Artificial Sequence
  source: /note="Description of Artificial Sequence: Synthetic oligonucleotide"
acaggagcugcaggaccuca

SEQ ID NO: 1220 - RNA, 20 nt, Artificial Sequence
  source: /note="Description of Artificial Sequence: Synthetic oligonucleotide"
accugggccacucacccuug

SEQ ID NO: 1221 - RNA, 20 nt, Artificial Sequence
  source: /note="Description of Artificial Sequence: Synthetic oligonucleotide"
ucaagggugaguggcccagg

SEQ ID NO: 1222 - RNA, 20 nt, Artificial Sequence
  source: /note="Description of Artificial Sequence: Synthetic oligonucleotide"
acaggagcacucucgugccu

SEQ ID NO: 1223 - RNA, 20 nt, Artificial Sequence
  source: /note="Description of Artificial Sequence: Synthetic oligonucleotide"
aggagcacucucgugccuug

SEQ ID NO: 1224 - RNA, 20 nt, Artificial Sequence
  source: /note="Description of Artificial Sequence: Synthetic oligonucleotide"
ugggccccacauuaacccca

SEQ ID NO: 1225 - RNA, 20 nt, Artificial Sequence
  source: /note="Description of Artificial Sequence: Synthetic oligonucleotide"
cucgugccuugggguuaaug

SEQ ID NO: 1226 - RNA, 20 nt, Artificial Sequence
  source: /note="Description of Artificial Sequence: Synthetic oligonucleotide"
ucgugccuugggguuaaugu

SEQ ID NO: 1227 - RNA, 20 nt, Artificial Sequence
  source: /note="Description of Artificial Sequence: Synthetic oligonucleotide"
ggaaaacugcgggcaaccuu

SEQ ID NO: 1228 - RNA, 20 nt, Artificial Sequence
  source: /note="Description of Artificial Sequence: Synthetic oligonucleotide"
gggaaaacugcgggcaaccu

SEQ ID NO: 1229 - RNA, 20 nt, Artificial Sequence
  source: /note="Description of Artificial Sequence: Synthetic oligonucleotide"
guugcccgcaguuuucccuc

SEQ ID NO: 1230 - RNA, 20 nt, Artificial Sequence
  source: /note="Description of Artificial Sequence: Synthetic oligonucleotide"
uuggugccucaaggugccag

SEQ ID NO: 1231 - RNA, 20 nt, Artificial Sequence
  source: /note="Description of Artificial Sequence: Synthetic oligonucleotide"
guuuucccucuggcaccuug

SEQ ID NO: 1232 - RNA, 20 nt, Artificial Sequence
  source: /note="Description of Artificial Sequence: Synthetic oligonucleotide"
gcucagggccacgcaugccc

SEQ ID NO: 1233 - RNA, 20 nt, Artificial Sequence
  source: /note="Description of Artificial Sequence: Synthetic oligonucleotide"
ucuacuguccugggcaugcg

SEQ ID NO: 1234 - RNA, 20 nt, Artificial Sequence
  source: /note="Description of Artificial Sequence: Synthetic oligonucleotide"
ccccgugagggugcagcuca

SEQ ID NO: 1235 - RNA, 20 nt, Artificial Sequence
  source: /note="Description of Artificial Sequence: Synthetic oligonucleotide"
gccccgugagggugcagcuc

SEQ ID NO: 1236 - RNA, 20 nt, Artificial Sequence
  source: /note="Description of Artificial Sequence: Synthetic oligonucleotide"
augcugucccucgccccgug

SEQ ID NO: 1237 - RNA, 20 nt, Artificial Sequence
  source: /note="Description of Artificial Sequence: Synthetic oligonucleotide"
gcugcacccucacggggcga

SEQ ID NO: 1238 - RNA, 20 nt, Artificial Sequence
  source: /note="Description of Artificial Sequence: Synthetic oligonucleotide"
gggacagcauccagaagcag

SEQ ID NO: 1239 - RNA, 20 nt, Artificial Sequence
  source: /note="Description of Artificial Sequence: Synthetic oligonucleotide"
ccagauucagcaaaugagcu

SEQ ID NO: 1240 - RNA, 20 nt, Artificial Sequence
  source: /note="Description of Artificial Sequence: Synthetic oligonucleotide"
uucuucgucuguugauccua

SEQ ID NO: 1241 - RNA, 20 nt, Artificial Sequence
  source: /note="Description of Artificial Sequence: Synthetic oligonucleotide"
cacuagucaauaacaaccuu

SEQ ID NO: 1242 - RNA, 20 nt, Artificial Sequence
  source: /note="Description of Artificial Sequence: Synthetic oligonucleotide"
uccccguuccccaacuugaa

SEQ ID NO: 1243 - RNA, 20 nt, Artificial Sequence
  source: /note="Description of Artificial Sequence: Synthetic oligonucleotide"
ggcucuguggaagagggugc

SEQ ID NO: 1244 - RNA, 20 nt, Artificial Sequence
  source: /note="Description of Artificial Sequence: Synthetic oligonucleotide"
gacugcaaggaccaguguuu

SEQ ID NO: 1245 - RNA, 20 nt, Artificial Sequence
  source: /note="Description of Artificial Sequence: Synthetic oligonucleotide"
ucaacuccugcccgaaacac

SEQ ID NO: 1246 - RNA, 20 nt, Artificial Sequence
  source: /note="Description of Artificial Sequence: Synthetic oligonucleotide"
acugcaaggaccaguguuuc

SEQ ID NO: 1247 - RNA, 20 nt, Artificial Sequence
  source: /note="Description of Artificial Sequence: Synthetic oligonucleotide"
caaggaccaguguuucgggc

SEQ ID NO: 1248 - RNA, 20 nt, Artificial Sequence
  source: /note="Description of Artificial Sequence: Synthetic oligonucleotide"
gguuagaacuuaguucagug

SEQ ID NO: 1249 - RNA, 20 nt, Artificial Sequence
  source: /note="Description of Artificial Sequence: Synthetic oligonucleotide"
acuuaguucagugaggcaug

SEQ ID NO: 1250 - RNA, 20 nt, Artificial Sequence
  source: /note="Description of Artificial Sequence: Synthetic oligonucleotide"
cuacggggugcccuggcaac

SEQ ID NO: 1251 - RNA, 20 nt, Artificial Sequence
  source: /note="Description of Artificial Sequence: Synthetic oligonucleotide"
guuugugugaaccuguugcc

SEQ ID NO: 1252 - RNA, 20 nt, Artificial Sequence
  source: /note="Description of Artificial Sequence: Synthetic oligonucleotide"
uuugugugaaccuguugcca

SEQ ID NO: 1253 - RNA, 20 nt, Artificial Sequence
  source: /note="Description of Artificial Sequence: Synthetic oligonucleotide"
uucaggccuacggggugccc

SEQ ID NO: 1254 - RNA, 20 nt, Artificial Sequence
  source: /note="Description of Artificial Sequence: Synthetic oligonucleotide"
cuguugccagggcaccccgu

SEQ ID NO: 1255 - RNA, 20 nt, Artificial Sequence
  source: /note="Description of Artificial Sequence: Synthetic oligonucleotide"
cacaaccuuucaggccuacg

SEQ ID NO: 1256 - RNA, 20 nt, Artificial Sequence
  source: /note="Description of Artificial Sequence: Synthetic oligonucleotide"
ucacaaccuuucaggccuac

SEQ ID NO: 1257 - RNA, 20 nt, Artificial Sequence
  source: /note="Description of Artificial Sequence: Synthetic oligonucleotide"
gacaccuuucacaaccuuuc

SEQ ID NO: 1258 - RNA, 20 nt, Artificial Sequence
  source: /note="Description of Artificial Sequence: Synthetic oligonucleotide"
uaggccugaaagguugugaa

SEQ ID NO: 1259 - RNA, 20 nt, Artificial Sequence
  source: /note="Description of Artificial Sequence: Synthetic oligonucleotide"
gguugugaaaggugucccac

SEQ ID NO: 1260 - RNA, 20 nt, Artificial Sequence
  source: /note="Description of Artificial Sequence: Synthetic oligonucleotide"
cuuggcugcuuugccaauaa

SEQ ID NO: 1261 - RNA, 20 nt, Artificial Sequence
  source: /note="Description of Artificial Sequence: Synthetic oligonucleotide"
gcuuggcugcuuugccaaua

SEQ ID NO: 1262 - RNA, 20 nt, Artificial Sequence
  source: /note="Description of Artificial Sequence: Synthetic oligonucleotide"
uaacaacgcagagaauagcu

SEQ ID NO: 1263 - RNA, 20 nt, Artificial Sequence
  source: /note="Description of Artificial Sequence: Synthetic oligonucleotide"
ggaaguguuuugccuccguc

SEQ ID NO: 1264 - RNA, 20 nt, Artificial Sequence
  source: /note="Description of Artificial Sequence: Synthetic oligonucleotide"
ccugagagucccacucaccc

SEQ ID NO: 1265 - RNA, 20 nt, Artificial Sequence
  source: /note="Description of Artificial Sequence: Synthetic oligonucleotide"
aagcgggagagcugggccgu

SEQ ID NO: 1266 - RNA, 20 nt, Artificial Sequence
  source: /note="Description of Artificial Sequence: Synthetic oligonucleotide"
uggucaggcucugggcugaa

SEQ ID NO: 1267 - RNA, 20 nt, Artificial Sequence
  source: /note="Description of Artificial Sequence: Synthetic oligonucleotide"
ccucgcagguggucaggcuc

SEQ ID NO: 1268 - RNA, 20 nt, Artificial Sequence
  source: /note="Description of Artificial Sequence: Synthetic oligonucleotide"
cgcagaccucgcaggugguc

SEQ ID NO: 1269 - RNA, 20 nt, Artificial Sequence
  source: /note="Description of Artificial Sequence: Synthetic oligonucleotide"
ccagagccugaccaccugcg

SEQ ID NO: 1270 - RNA, 20 nt, Artificial Sequence
  source: /note="Description of Artificial Sequence: Synthetic oligonucleotide"
gcaggcaccgcagaccucgc

SEQ ID NO: 1271 - RNA, 20 nt, Artificial Sequence
  source: /note="Description of Artificial Sequence: Synthetic oligonucleotide"
caggugggagcgcgcguggc

SEQ ID NO: 1272 - RNA, 20 nt, Artificial Sequence
  source: /note="Description of Artificial Sequence: Synthetic oligonucleotide"
cuacgagcuugugaagcaga

SEQ ID NO: 1273 - RNA, 20 nt, Artificial Sequence
  source: /note="Description of Artificial Sequence: Synthetic oligonucleotide"
uacgagcuugugaagcagaa

SEQ ID NO: 1274 - RNA, 20 nt, Artificial Sequence
  source: /note="Description of Artificial Sequence: Synthetic oligonucleotide"
gucugccugacgcccaccuu

SEQ ID NO: 1275 - RNA, 20 nt, Artificial Sequence
  source: /note="Description of Artificial Sequence: Synthetic oligonucleotide"
agguggucgccggggccccc

SEQ ID NO: 1276 - RNA, 20 nt, Artificial Sequence
  source: /note="Description of Artificial Sequence: Synthetic oligonucleotide"
gucgccggggccccccggcc

SEQ ID NO: 1277 - RNA, 20 nt, Artificial Sequence
  source: /note="Description of Artificial Sequence: Synthetic oligonucleotide"
aggcccuuggccgagaagcc

SEQ ID NO: 1278 - RNA, 20 nt, Artificial Sequence
  source: /note="Description of Artificial Sequence: Synthetic oligonucleotide"
caagucgccucccggcuucu

SEQ ID NO: 1279 - RNA, 20 nt, Artificial Sequence
  source: /note="Description of Artificial Sequence: Synthetic oligonucleotide"
acuccucaaaaagacaccac

SEQ ID NO: 1280 - RNA, 20 nt, Artificial Sequence
  source: /note="Description of Artificial Sequence: Synthetic oligonucleotide"
gugccuuuggggaggccggc

SEQ ID NO: 1281 - RNA, 20 nt, Artificial Sequence
  source: /note="Description of Artificial Sequence: Synthetic oligonucleotide"
gacugaggccacugugccuu

SEQ ID NO: 1282 - RNA, 20 nt, Artificial Sequence
  source: /note="Description of Artificial Sequence: Synthetic oligonucleotide"
guggccucagucugaggaug

SEQ ID NO: 1283 - RNA, 20 nt, Artificial Sequence
  source: /note="Description of Artificial Sequence: Synthetic oligonucleotide"
uggccucagucugaggauga

SEQ ID NO: 1284 - RNA, 20 nt, Artificial Sequence
  source: /note="Description of Artificial Sequence: Synthetic oligonucleotide"
ggccucagucugaggaugag

SEQ ID NO: 1285 - RNA, 20 nt, Artificial Sequence
  source: /note="Description of Artificial Sequence: Synthetic oligonucleotide"
cuugggacccacacucacug

SEQ ID NO: 1286 - RNA, 20 nt, Artificial Sequence
  source: /note="Description of Artificial Sequence: Synthetic oligonucleotide"
cagaaccucccucggcucuu

SEQ ID NO: 1287 - RNA, 20 nt, Artificial Sequence
  source: /note="Description of Artificial Sequence: Synthetic oligonucleotide"
ccagaaccucccucggcucu

SEQ ID NO: 1288 - RNA, 20 nt, Artificial Sequence
  source: /note="Description of Artificial Sequence: Synthetic oligonucleotide"
agugugggucccaagagccg

SEQ ID NO: 1289 - RNA, 20 nt, Artificial Sequence
  source: /note="Description of Artificial Sequence: Synthetic oligonucleotide"
ccaagagccgagggagguuc

SEQ ID NO: 1290 - RNA, 20 nt, Artificial Sequence
  source: /note="Description of Artificial Sequence: Synthetic oligonucleotide"
gccgagggagguucuggcgc

SEQ ID NO: 1291 - RNA, 20 nt, Artificial Sequence
  source: /note="Description of Artificial Sequence: Synthetic oligonucleotide"
ccgagggagguucuggcgcu

SEQ ID NO: 1292 - RNA, 20 nt, Artificial Sequence
  source: /note="Description of Artificial Sequence: Synthetic oligonucleotide"
guucuggcgcugggaggguc

SEQ ID NO: 1293 - RNA, 20 nt, Artificial Sequence
  source: /note="Description of Artificial Sequence: Synthetic oligonucleotide"
cugggcuacagcccaaccug

SEQ ID NO: 1294 - RNA, 20 nt, Artificial Sequence
  source: /note="Description of Artificial Sequence: Synthetic oligonucleotide"
gagggucgggaccucagguu

SEQ ID NO: 1295 - RNA, 20 nt, Artificial Sequence
  source: /note="Description of Artificial Sequence: Synthetic oligonucleotide"
cucagguugggcuguagccc

SEQ ID NO: 1296 - RNA, 20 nt, Artificial Sequence
  source: /note="Description of Artificial Sequence: Synthetic oligonucleotide"
uagcccagggacagggccca

SEQ ID NO: 1297 - RNA, 20 nt, Artificial Sequence
  source: /note="Description of Artificial Sequence: Synthetic oligonucleotide"
ggacuacagcucccaugucc

SEQ ID NO: 1298 - RNA, 20 nt, Artificial Sequence
  source: /note="Description of Artificial Sequence: Synthetic oligonucleotide"
gacuacagcucccauguccu

SEQ ID NO: 1299 - RNA, 20 nt, Artificial Sequence
  source: /note="Description of Artificial Sequence: Synthetic oligonucleotide"
gaccaauacucuggccuggc

SEQ ID NO: 1300 - RNA, 20 nt, Artificial Sequence
  source: /note="Description of Artificial Sequence: Synthetic oligonucleotide"
gcuugaccaauacucuggcc

SEQ ID NO: 1301 - RNA, 20 nt, Artificial Sequence
  source: /note="Description of Artificial Sequence: Synthetic oligonucleotide"
cagaggcuugaccaauacuc

SEQ ID NO: 1302 - RNA, 20 nt, Artificial Sequence
  source: /note="Description of Artificial Sequence: Synthetic oligonucleotide"
cggcccaaaaggagaugcag

SEQ ID NO: 1303 - RNA, 20 nt, Artificial Sequence
  source: /note="Description of Artificial Sequence: Synthetic oligonucleotide"
cacauccaaggcggcccaaa

SEQ ID NO: 1304 - RNA, 20 nt, Artificial Sequence
  source: /note="Description of Artificial Sequence: Synthetic oligonucleotide"
caucuccuuuugggccgccu

SEQ ID NO: 1305 - RNA, 20 nt, Artificial Sequence
  source: /note="Description of Artificial Sequence: Synthetic oligonucleotide"
ggcacgauccacauccaagg

SEQ ID NO: 1306 - RNA, 20 nt, Artificial Sequence
  source: /note="Description of Artificial Sequence: Synthetic oligonucleotide"
cuuuugggccgccuuggaug

SEQ ID NO: 1307 - RNA, 20 nt, Artificial Sequence
  source: /note="Description of Artificial Sequence: Synthetic oligonucleotide"
ggaggcacgauccacaucca

SEQ ID NO: 1308 - RNA, 20 nt, Artificial Sequence
  source: /note="Description of Artificial Sequence: Synthetic oligonucleotide"
gaucagcaaaguaaaguggg

SEQ ID NO: 1309 - RNA, 20 nt, Artificial Sequence
  source: /note="Description of Artificial Sequence: Synthetic oligonucleotide"
gaagaucagcaaaguaaagu

SEQ ID NO: 1310 - RNA, 20 nt, Artificial Sequence
  source: /note="Description of Artificial Sequence: Synthetic oligonucleotide"
agccgcagugaggcuuucag

SEQ ID NO: 1311 - RNA, 20 nt, Artificial Sequence
  source: /note="Description of Artificial Sequence: Synthetic oligonucleotide"
caggcucaucagccgcagug

SEQ ID NO: 1312 - RNA, 20 nt, Artificial Sequence
  source: /note="Description of Artificial Sequence: Synthetic oligonucleotide"
ugcggcugaugagccugcca

SEQ ID NO: 1313 - RNA, 20 nt, Artificial Sequence
  source: /note="Description of Artificial Sequence: Synthetic oligonucleotide"
cgccacugaggggcagcucu

SEQ ID NO: 1314 - RNA, 20 nt, Artificial Sequence
  source: /note="Description of Artificial Sequence: Synthetic oligonucleotide"
uuggcuuucucugggccugu

SEQ ID NO: 1315 - RNA, 20 nt, Artificial Sequence
  source: /note="Description of Artificial Sequence: Synthetic oligonucleotide"
uaggggcggugaagguaacc

SEQ ID NO: 1316 - RNA, 20 nt, Artificial Sequence
  source: /note="Description of Artificial Sequence: Synthetic oligonucleotide"
aggggcggugaagguaacca

SEQ ID NO: 1317 - RNA, 20 nt, Artificial Sequence
  source: /note="Description of Artificial Sequence: Synthetic oligonucleotide"
aagcuaggccacaggaaccc

SEQ ID NO: 1318 - RNA, 20 nt, Artificial Sequence
  source: /note="Description of Artificial Sequence: Synthetic oligonucleotide"
gaagguaaccaggguuccug

SEQ ID NO: 1319 - RNA, 20 nt, Artificial Sequence
  source: /note="Description of Artificial Sequence: Synthetic oligonucleotide"
cacugagaaagcuaggccac

SEQ ID NO: 1320 - RNA, 20 nt, Artificial Sequence
  source: /note="Description of Artificial Sequence: Synthetic oligonucleotide"
cuguggccuagcuuucucag

SEQ ID NO: 1321 - RNA, 20 nt, Artificial Sequence
  source: /note="Description of Artificial Sequence: Synthetic oligonucleotide"
cuagcuuucucagugguagu

SEQ ID NO: 1322 - RNA, 20 nt, Artificial Sequence
  source: /note="Description of Artificial Sequence: Synthetic oligonucleotide"
uggaagcaucuuggauagac

SEQ ID NO: 1323 - RNA, 20 nt, Artificial Sequence
  source: /note="Description of Artificial Sequence: Synthetic oligonucleotide"
gaagcaucuuggauagacag

SEQ ID NO: 1324 - RNA, 20 nt, Artificial Sequence
  source: /note="Description of Artificial Sequence: Synthetic oligonucleotide"
aaucgugggcaccucccauc

SEQ ID NO: 1325 - RNA, 20 nt, Artificial Sequence
  source: /note="Description of Artificial Sequence: Synthetic oligonucleotide"
acaggggaucaccugauggg

SEQ ID NO: 1326 - RNA, 20 nt, Artificial Sequence
  source: /note="Description of Artificial Sequence: Synthetic oligonucleotide"
ugaugggaggugcccacgau

SEQ ID NO: 1327 - RNA, 20 nt, Artificial Sequence
  source: /note="Description of Artificial Sequence: Synthetic oligonucleotide"
uugaugacaggaccaaucgu

SEQ ID NO: 1328 - RNA, 20 nt, Artificial Sequence
  source: /note="Description of Artificial Sequence: Synthetic oligonucleotide"
cuugaugacaggaccaaucg

SEQ ID NO: 1329 - RNA, 20 nt, Artificial Sequence
  source: /note="Description of Artificial Sequence: Synthetic oligonucleotide"
agagagcugccucugcgugg

SEQ ID NO: 1330 - RNA, 20 nt, Artificial Sequence
  source: /note="Description of Artificial Sequence: Synthetic oligonucleotide"
ugccugugggcacggcaggc

SEQ ID NO: 1331 - RNA, 20 nt, Artificial Sequence
  source: /note="Description of Artificial Sequence: Synthetic oligonucleotide"
gggcacggcaggcaggguuu

SEQ ID NO: 1332 - RNA, 20 nt, Artificial Sequence
  source: /note="Description of Artificial Sequence: Synthetic oligonucleotide"
accugcucacugcaccugga

SEQ ID NO: 1333 - RNA, 20 nt, Artificial Sequence
  source: /note="Description of Artificial Sequence: Synthetic oligonucleotide"
aaccugcucacugcaccugg

SEQ ID NO: 1334 - RNA, 20 nt, Artificial Sequence
  source: /note="Description of Artificial Sequence: Synthetic oligonucleotide"
uuaaaccugcucacugcacc

SEQ ID NO: 1335 - RNA, 20 nt, Artificial Sequence
  source: /note="Description of Artificial Sequence: Synthetic oligonucleotide"
ugcagugagcagguuuaaca

SEQ ID NO: 1336 - RNA, 20 nt, Artificial Sequence
  source: /note="Description of Artificial Sequence: Synthetic oligonucleotide"
gggaaagccugauguuguaa

SEQ ID NO: 1337 - RNA, 20 nt, Artificial Sequence
  source: /note="Description of Artificial Sequence: Synthetic oligonucleotide"
ugggaaagccugauguugua

SEQ ID NO: 1338 - RNA, 20 nt, Artificial Sequence
  source: /note="Description of Artificial Sequence: Synthetic oligonucleotide"
aggacgucccuuacaacauc

SEQ ID NO: 1339 - RNA, 20 nt, Artificial Sequence
  source: /note="Description of Artificial Sequence: Synthetic oligonucleotide"
ucuaauguccacaaagauau

SEQ ID NO: 1340 - RNA, 20 nt, Artificial Sequence
  source: /note="Description of Artificial Sequence: Synthetic oligonucleotide"
cucuaauguccacaaagaua

SEQ ID NO: 1341 - RNA, 20 nt, Artificial Sequence
  source: /note="Description of Artificial Sequence: Synthetic oligonucleotide"
uuguggacauuagagucugg

SEQ ID NO: 1342 - RNA, 20 nt, Artificial Sequence
  source: /note="Description of Artificial Sequence: Synthetic oligonucleotide"
aauggggggcuccauugggc

SEQ ID NO: 1343 - RNA, 20 nt, Artificial Sequence
  source: /note="Description of Artificial Sequence: Synthetic oligonucleotide"
gccaaauggggggcuccauu

SEQ ID NO: 1344 - RNA, 20 nt, Artificial Sequence
  source: /note="Description of Artificial Sequence: Synthetic oligonucleotide"
ugccaaauggggggcuccau

SEQ ID NO: 1345 - RNA, 20 nt, Artificial Sequence
  source: /note="Description of Artificial Sequence: Synthetic oligonucleotide"
gcccaauggagccccccauu

SEQ ID NO: 1346 - RNA, 20 nt, Artificial Sequence
  source: /note="Description of Artificial Sequence: Synthetic oligonucleotide"
gaacauaaggugccaaaugg

SEQ ID NO: 1347 - RNA, 20 nt, Artificial Sequence
  source: /note="Description of Artificial Sequence: Synthetic oligonucleotide"
ggaacauaaggugccaaaug

SEQ ID NO: 1348 - RNA, 20 nt, Artificial Sequence
  source: /note="Description of Artificial Sequence: Synthetic oligonucleotide"
gggaacauaaggugccaaau

SEQ ID NO: 1349 - RNA, 20 nt, Artificial Sequence
  source: /note="Description of Artificial Sequence: Synthetic oligonucleotide"
agcaacuucaagggaacaua

SEQ ID NO: 1350 - RNA, 20 nt, Artificial Sequence
  source: /note="Description of Artificial Sequence: Synthetic oligonucleotide"
acucaguggaagcaacuuca

SEQ ID NO: 1351 - RNA, 20 nt, Artificial Sequence
  source: /note="Description of Artificial Sequence: Synthetic oligonucleotide"
uggaagcacggcagacucag

SEQ ID NO: 1352 - RNA, 20 nt, Artificial Sequence
  source: /note="Description of Artificial Sequence: Synthetic oligonucleotide"
acugagucugccgugcuucc

SEQ ID NO: 1353 - RNA, 20 nt, Artificial Sequence
  source: /note="Description of Artificial Sequence: Synthetic oligonucleotide"
ucugccgugcuuccaggggc

SEQ ID NO: 1354 - RNA, 20 nt, Artificial Sequence
  source: /note="Description of Artificial Sequence: Synthetic oligonucleotide"
cugccgugcuuccaggggca

SEQ ID NO: 1355 - RNA, 20 nt, Artificial Sequence
  source: /note="Description of Artificial Sequence: Synthetic oligonucleotide"
ccugcuaugggagcuauuug

SEQ ID NO: 1356 - RNA, 20 nt, Artificial Sequence
  source: /note="Description of Artificial Sequence: Synthetic oligonucleotide"
ucccugcuaugggagcuauu

SEQ ID NO: 1357 - RNA, 20 nt, Artificial Sequence
  source: /note="Description of Artificial Sequence: Synthetic oligonucleotide"
ccccaaauagcucccauagc

SEQ ID NO: 1358 - RNA, 20 nt, Artificial Sequence
  source: /note="Description of Artificial Sequence: Synthetic oligonucleotide"
cccaaauagcucccauagca

SEQ ID NO: 1359 - RNA, 20 nt, Artificial Sequence
  source: /note="Description of Artificial Sequence: Synthetic oligonucleotide"
uccccuaggaucccugcuau

SEQ ID NO: 1360 - RNA, 20 nt, Artificial Sequence
  source: /note="Description of Artificial Sequence: Synthetic oligonucleotide"
cuccccuaggaucccugcua

SEQ ID NO: 1361 - RNA, 20 nt, Artificial Sequence
  source: /note="Description of Artificial Sequence: Synthetic oligonucleotide"
gcucccauagcagggauccu

SEQ ID NO: 1362 - RNA, 20 nt, Artificial Sequence
  source: /note="Description of Artificial Sequence: Synthetic oligonucleotide"
cucccauagcagggauccua

SEQ ID NO: 1363 - RNA, 20 nt, Artificial Sequence
  source: /note="Description of Artificial Sequence: Synthetic oligonucleotide"
acaggcagugaccaaauucu

SEQ ID NO: 1364 - RNA, 20 nt, Artificial Sequence
  source: /note="Description of Artificial Sequence: Synthetic oligonucleotide"
guaucugauuaccuagaauu

SEQ ID NO: 1365 - RNA, 20 nt, Artificial Sequence
  source: /note="Description of Artificial Sequence: Synthetic oligonucleotide"
cuuaaggacuuuggguagac

SEQ ID NO: 1366 - RNA, 20 nt, Artificial Sequence
  source: /note="Description of Artificial Sequence: Synthetic oligonucleotide"
guagagagcuuaaggacuuu

SEQ ID NO: 1367 - RNA, 20 nt, Artificial Sequence
  source: /note="Description of Artificial Sequence: Synthetic oligonucleotide"
uguagagagcuuaaggacuu

SEQ ID NO: 1368 - RNA, 20 nt, Artificial Sequence
  source: /note="Description of Artificial Sequence: Synthetic oligonucleotide"
ccuagcccuuuggcaucgag

SEQ ID NO: 1369 - RNA, 20 nt, Artificial Sequence
  source: /note="Description of Artificial Sequence: Synthetic oligonucleotide"
gccuagcccuuuggcaucga

SEQ ID NO: 1370 - RNA, 20 nt, Artificial Sequence
  source: /note="Description of Artificial Sequence: Synthetic oligonucleotide"
ugccuagcccuuuggcaucg

SEQ ID NO: 1371 - RNA, 20 nt, Artificial Sequence
  source: /note="Description of Artificial Sequence: Synthetic oligonucleotide"
uacacuccccucgaugccaa

SEQ ID NO: 1372 - RNA, 20 nt, Artificial Sequence
  source: /note="Description of Artificial Sequence: Synthetic oligonucleotide"
acacuccccucgaugccaaa

SEQ ID NO: 1373 - RNA, 20 nt, Artificial Sequence
  source: /note="Description of Artificial Sequence: Synthetic oligonucleotide"
ccccucgaugccaaagggcu

SEQ ID NO: 1374 - RNA, 20 nt, Artificial Sequence
  source: /note="Description of Artificial Sequence: Synthetic oligonucleotide"
ucgaugccaaagggcuaggc

SEQ ID NO: 1375 - RNA, 20 nt, Artificial Sequence
  source: /note="Description of Artificial Sequence: Synthetic oligonucleotide"
gaaaucugcggccugagucu

SEQ ID NO: 1376 - RNA, 20 nt, Artificial Sequence
  source: /note="Description of Artificial Sequence: Synthetic oligonucleotide"
uuggcugcucaggcaguugg

SEQ ID NO: 1377 - RNA, 20 nt, Artificial Sequence
  source: /note="Description of Artificial Sequence: Synthetic oligonucleotide"
uuuuggcugcucaggcaguu

SEQ ID NO: 1378 - RNA, 20 nt, Artificial Sequence
  source: /note="Description of Artificial Sequence: Synthetic oligonucleotide"
acaccagacccuccuaccuc

SEQ ID NO: 1379 - RNA, 20 nt, Artificial Sequence
  source: /note="Description of Artificial Sequence: Synthetic oligonucleotide"
cgccaccuuggccggccuug

SEQ ID NO: 1380 - RNA, 20 nt, Artificial Sequence
  source: /note="Description of Artificial Sequence: Synthetic oligonucleotide"
ccgccaccuuggccggccuu

SEQ ID NO: 1381 - RNA, 20 nt, Artificial Sequence
  source: /note="Description of Artificial Sequence: Synthetic oligonucleotide"
gccgccaccuuggccggccu

SEQ ID NO: 1382 - RNA, 20 nt, Artificial Sequence
  source: /note="Description of Artificial Sequence: Synthetic oligonucleotide"
uucacggccgccaccuuggc

SEQ ID NO: 1383 - RNA, 20 nt, Artificial Sequence
  source: /note="Description of Artificial Sequence: Synthetic oligonucleotide"
gggguucacggccgccaccu

SEQ ID NO: 1384 - RNA, 20 nt, Artificial Sequence
  source: /note="Description of Artificial Sequence: Synthetic oligonucleotide"
ugcggagacaaaacacaggg

SEQ ID NO: 1385 - RNA, 20 nt, Artificial Sequence
  source: /note="Description of Artificial Sequence: Synthetic oligonucleotide"
cugcggagacaaaacacagg

SEQ ID NO: 1386 - RNA, 20 nt, Artificial Sequence
  source: /note="Description of Artificial Sequence: Synthetic oligonucleotide"
gcugcggagacaaaacacag

SEQ ID NO: 1387 - RNA, 20 nt, Artificial Sequence
  source: /note="Description of Artificial Sequence: Synthetic oligonucleotide"
cccgucacuaucuaaagcug

SEQ ID NO: 1388 - RNA, 20 nt, Artificial Sequence
  source: /note="Description of Artificial Sequence: Synthetic oligonucleotide"
uccgcagcuuuagauaguga

SEQ ID NO: 1389 - RNA, 20 nt, Artificial Sequence
  source: /note="Description of Artificial Sequence: Synthetic oligonucleotide"
ccgcagcuuuagauagugac

SEQ ID NO: 1390 - RNA, 20 nt, Artificial Sequence
  source: /note="Description of Artificial Sequence: Synthetic oligonucleotide"
cgcagcuuuagauagugacg

SEQ ID NO: 1391 - RNA, 20 nt, Artificial Sequence
  source: /note="Description of Artificial Sequence: Synthetic oligonucleotide"
gcagcuuuagauagugacgg

SEQ ID NO: 1392 - RNA, 20 nt, Artificial Sequence
  source: /note="Description of Artificial Sequence: Synthetic oligonucleotide"
caaaccaggcaccgcacagc

SEQ ID NO: 1393 - RNA, 20 nt, Artificial Sequence
  source: /note="Description of Artificial Sequence: Synthetic oligonucleotide"
gggcacgggcguggcuagac

SEQ ID NO: 1394 - RNA, 20 nt, Artificial Sequence
  source: /note="Description of Artificial Sequence: Synthetic oligonucleotide"
gacgcccagguggcgcaggu

SEQ ID NO: 1395 - RNA, 20 nt, Artificial Sequence
  source: /note="Description of Artificial Sequence: Synthetic oligonucleotide"
cgcugacgcccagguggcgc

SEQ ID NO: 1396 - RNA, 20 nt, Artificial Sequence
  source: /note="Description of Artificial Sequence: Synthetic oligonucleotide"
cgugcccaccugcgccaccu

SEQ ID NO: 1397 - RNA, 20 nt, Artificial Sequence
  source: /note="Description of Artificial Sequence: Synthetic oligonucleotide"
ccggaucgcugacgcccagg

SEQ ID NO: 1398 - RNA, 20 nt, Artificial Sequence
  source: /note="Description of Artificial Sequence: Synthetic oligonucleotide"
cguccggaucgcugacgccc

SEQ ID NO: 1399 - RNA, 20 nt, Artificial Sequence
  source: /note="Description of Artificial Sequence: Synthetic oligonucleotide"
augggggaucccuuggcguc

SEQ ID NO: 1400 - RNA, 20 nt, Artificial Sequence
  source: /note="Description of Artificial Sequence: Synthetic oligonucleotide"
cgucagcgauccggacgcca

SEQ ID NO: 1401 - RNA, 20 nt, Artificial Sequence
  source: /note="Description of Artificial Sequence: Synthetic oligonucleotide"
gucagcgauccggacgccaa

SEQ ID NO: 1402 - RNA, 20 nt, Artificial Sequence
  source: /note="Description of Artificial Sequence: Synthetic oligonucleotide"
cacgucuaugggggaucccu

SEQ ID NO: 1403 - RNA, 20 nt, Artificial Sequence
  source: /note="Description of Artificial Sequence: Synthetic oligonucleotide"
cccguggagcacgucuaugg

SEQ ID NO: 1404 - RNA, 20 nt, Artificial Sequence
  source: /note="Description of Artificial Sequence: Synthetic oligonucleotide"
gcccguggagcacgucuaug

SEQ ID NO: 1405 - RNA, 20 nt, Artificial Sequence
  source: /note="Description of Artificial Sequence: Synthetic oligonucleotide"
agcccguggagcacgucuau

SEQ ID NO: 1406 - RNA, 20 nt, Artificial Sequence
  source: /note="Description of Artificial Sequence: Synthetic oligonucleotide"
gagcccguggagcacgucua

SEQ ID NO: 1407 - RNA, 20 nt, Artificial Sequence
  source: /note="Description of Artificial Sequence: Synthetic oligonucleotide"
ucccccauagacgugcucca

SEQ ID NO: 1408 - RNA, 20 nt, Artificial Sequence
  source: /note="Description of Artificial Sequence: Synthetic oligonucleotide"
cccccauagacgugcuccac

SEQ ID NO: 1409 - RNA, 20 nt, Artificial Sequence
  source: /note="Description of Artificial Sequence: Synthetic oligonucleotide"
acgugcuccacgggcucauc

SEQ ID NO: 1410 - RNA, 20 nt, Artificial Sequence
  source: /note="Description of Artificial Sequence: Synthetic oligonucleotide"
ugcuccacgggcucaucagg

SEQ ID NO: 1411 - RNA, 20 nt, Artificial Sequence
  source: /note="Description of Artificial Sequence: Synthetic oligonucleotide"
gcuccacgggcucaucagga

SEQ ID NO: 1412 - RNA, 20 nt, Artificial Sequence
  source: /note="Description of Artificial Sequence: Synthetic oligonucleotide"
cacgggcucaucaggaggga

SEQ ID NO: 1413 - RNA, 20 nt, Artificial Sequence
  source: /note="Description of Artificial Sequence: Synthetic oligonucleotide"
gccugggugggaggcggauc

SEQ ID NO: 1414 - RNA, 20 nt, Artificial Sequence
  source: /note="Description of Artificial Sequence: Synthetic oligonucleotide"
ccagggcgccgcgccugggu

SEQ ID NO: 1415 - RNA, 20 nt, Artificial Sequence
  source: /note="Description of Artificial Sequence: Synthetic oligonucleotide"
auccgccucccacccaggcg

SEQ ID NO: 1416 - RNA, 20 nt, Artificial Sequence
  source: /note="Description of Artificial Sequence: Synthetic oligonucleotide"
cccacccaggcgcggcgccc

SEQ ID NO: 1417 - RNA, 20 nt, Artificial Sequence
  source: /note="Description of Artificial Sequence: Synthetic oligonucleotide"
cgcggcgcccuggcccaccc

SEQ ID NO: 1418 - RNA, 20 nt, Artificial Sequence
  source: /note="Description of Artificial Sequence: Synthetic oligonucleotide"
gggaggcggccgccccgggu

SEQ ID NO: 1419 - RNA, 20 nt, Artificial Sequence
  source: /note="Description of Artificial Sequence: Synthetic oligonucleotide"
cuucuuggccggcggugggg

SEQ ID NO: 1420 - RNA, 20 nt, Artificial Sequence
  source: /note="Description of Artificial Sequence: Synthetic oligonucleotide"
agcuuggccuucuuggccgg

SEQ ID NO: 1421 - RNA, 20 nt, Artificial Sequence
  source: /note="Description of Artificial Sequence: Synthetic oligonucleotide"
cauacccgcggccuucagcu

SEQ ID NO: 1422 - RNA, 20 nt, Artificial Sequence
  source: /note="Description of Artificial Sequence: Synthetic oligonucleotide"
aaggccaagcugaaggccgc

SEQ ID NO: 1423 - RNA, 20 nt, Artificial Sequence
  source: /note="Description of Artificial Sequence: Synthetic oligonucleotide"
caagcugaaggccgcgggua

SEQ ID NO: 1424 - RNA, 20 nt, Artificial Sequence
  source: /note="Description of Artificial Sequence: Synthetic oligonucleotide"
ccaggggcuggccauacccg

SEQ ID NO: 1425 - RNA, 20 nt, Artificial Sequence
  source: /note="Description of Artificial Sequence: Synthetic oligonucleotide"
ccgcggguauggccagcccc

SEQ ID NO: 1426 - RNA, 20 nt, Artificial Sequence
  source: /note="Description of Artificial Sequence: Synthetic oligonucleotide"
cgcggguauggccagccccu

SEQ ID NO: 1427 - RNA, 20 nt, Artificial Sequence
  source: /note="Description of Artificial Sequence: Synthetic oligonucleotide"
cggguauggccagccccugg

SEQ ID NO: 1428 - RNA, 20 nt, Artificial Sequence
  source: /note="Description of Artificial Sequence: Synthetic oligonucleotide"
aucagaggcccagaaaaugc

SEQ ID NO: 1429 - RNA, 20 nt, Artificial Sequence
  source: /note="Description of Artificial Sequence: Synthetic oligonucleotide"
ccgcagccgccggcauuuuc

SEQ ID NO: 1430 - RNA, 20 nt, Artificial Sequence
  source: /note="Description of Artificial Sequence: Synthetic oligonucleotide"
cgcagccgccggcauuuucu

SEQ ID NO: 1431 - RNA, 20 nt, Artificial Sequence
  source: /note="Description of Artificial Sequence: Synthetic oligonucleotide"
aggagacggcuccacaucag

SEQ ID NO: 1432 - RNA, 20 nt, Artificial Sequence
  source: /note="Description of Artificial Sequence: Synthetic oligonucleotide"
gagaaccuacagagguugag

SEQ ID NO: 1433 - RNA, 20 nt, Artificial Sequence
  source: /note="Description of Artificial Sequence: Synthetic oligonucleotide"
cgucuccucucaaccucugu

SEQ ID NO: 1434 - RNA, 20 nt, Artificial Sequence
  source: /note="Description of Artificial Sequence: Synthetic oligonucleotide"
gcugaagcgagaaccuacag

SEQ ID NO: 1435 - RNA, 20 nt, Artificial Sequence
  source: /note="Description of Artificial Sequence: Synthetic oligonucleotide"
ugugaccccccccccgggag

SEQ ID NO: 1436 - RNA, 20 nt, Artificial Sequence
  source: /note="Description of Artificial Sequence: Synthetic oligonucleotide"
cugugaccccccccccggga

SEQ ID NO: 1437 - RNA, 20 nt, Artificial Sequence
  source: /note="Description of Artificial Sequence: Synthetic oligonucleotide"
gcugugaccccccccccggg

SEQ ID NO: 1438 - RNA, 20 nt, Artificial Sequence
  source: /note="Description of Artificial Sequence: Synthetic oligonucleotide"
cccuggagccccucccgggg

SEQ ID NO: 1439 - RNA, 20 nt, Artificial Sequence
  source: /note="Description of Artificial Sequence: Synthetic oligonucleotide"
gucuacucccugccccagca

SEQ ID NO: 1440 - RNA, 20 nt, Artificial Sequence
  source: /note="Description of Artificial Sequence: Synthetic oligonucleotide"
cagaaccggcccacugccaa

SEQ ID NO: 1441 - RNA, 20 nt, Artificial Sequence
  source: /note="Description of Artificial Sequence: Synthetic oligonucleotide"
agacaggggcccuuggcagu

SEQ ID NO: 1442 - RNA, 20 nt, Artificial Sequence
  source: /note="Description of Artificial Sequence: Synthetic oligonucleotide"
acaagaucucugggcagaac

SEQ ID NO: 1443 - RNA, 20 nt, Artificial Sequence
  source: /note="Description of Artificial Sequence: Synthetic oligonucleotide"
ccacugccaacaagaucucu

SEQ ID NO: 1444 - RNA, 20 nt, Artificial Sequence
  source: /note="Description of Artificial Sequence: Synthetic oligonucleotide"
guucugcccagagaucuugu

SEQ ID NO: 1445 - RNA, 20 nt, Artificial Sequence
  source: /note="Description of Artificial Sequence: Synthetic oligonucleotide"
cuuguuggcagugggcugcu

SEQ ID NO: 1446 - RNA, 20 nt, Artificial Sequence
  source: /note="Description of Artificial Sequence: Synthetic oligonucleotide"
auucucaggaagggucaugg

SEQ ID NO: 1447 - RNA, 20 nt, Artificial Sequence
  source: /note="Description of Artificial Sequence: Synthetic oligonucleotide"
uucauucucaggaaggguca

SEQ ID NO: 1448 - RNA, 20 nt, Artificial Sequence
  source: /note="Description of Artificial Sequence: Synthetic oligonucleotide"
ccaccuuggccuucauucuc

SEQ ID NO: 1449 - RNA, 20 nt, Artificial Sequence
  source: /note="Description of Artificial Sequence: Synthetic oligonucleotide"
cugagaaugaaggccaaggu

SEQ ID NO: 1450 - RNA, 20 nt, Artificial Sequence
  source: /note="Description of Artificial Sequence: Synthetic oligonucleotide"
ugagaaugaaggccaaggug

SEQ ID NO: 1451 - RNA, 20 nt, Artificial Sequence
  source: /note="Description of Artificial Sequence: Synthetic oligonucleotide"
ugggugcucugcacacuaaa

SEQ ID NO: 1452 - RNA, 20 nt, Artificial Sequence
  source: /note="Description of Artificial Sequence: Synthetic oligonucleotide"
gugcuaugugccauccagac

SEQ ID NO: 1453 - RNA, 20 nt, Artificial Sequence
  source: /note="Description of Artificial Sequence: Synthetic oligonucleotide"
gucccaacaaggacagggug

SEQ ID NO: 1454 - RNA, 20 nt, Artificial Sequence
  source: /note="Description of Artificial Sequence: Synthetic oligonucleotide"
ugccucacccuguccuuguu

SEQ ID NO: 1455 - RNA, 20 nt, Artificial Sequence
  source: /note="Description of Artificial Sequence: Synthetic oligonucleotide"
uugcucugugggucccaaca

SEQ ID NO: 1456 - RNA, 20 nt, Artificial Sequence
  source: /note="Description of Artificial Sequence: Synthetic oligonucleotide"
ccaagauuccauugcucugu

SEQ ID NO: 1457 - RNA, 20 nt, Artificial Sequence
  source: /note="Description of Artificial Sequence: Synthetic oligonucleotide"
accaagauuccauugcucug

SEQ ID NO: 1458 - RNA, 20 nt, Artificial Sequence
  source: /note="Description of Artificial Sequence: Synthetic oligonucleotide"
gcccucaguccuggcggagg

SEQ ID NO: 1459 - RNA, 20 nt, Artificial Sequence
  source: /note="Description of Artificial Sequence: Synthetic oligonucleotide"
ugggcccucaguccuggcgg

SEQ ID NO: 1460 - RNA, 20 nt, Artificial Sequence
  source: /note="Description of Artificial Sequence: Synthetic oligonucleotide"
acaugggcccucaguccugg

SEQ ID NO: 1461 - RNA, 20 nt, Artificial Sequence
  source: /note="Description of Artificial Sequence: Synthetic oligonucleotide"
auccuccuccgccaggacug

SEQ ID NO: 1462 - RNA, 20 nt, Artificial Sequence
  source: /note="Description of Artificial Sequence: Synthetic oligonucleotide"
uccuccuccgccaggacuga

SEQ ID NO: 1463 - RNA, 20 nt, Artificial Sequence
  source: /note="Description of Artificial Sequence: Synthetic oligonucleotide"
agauacccggcaggagugag

SEQ ID NO: 1464 - RNA, 20 nt, Artificial Sequence
  source: /note="Description of Artificial Sequence: Synthetic oligonucleotide"
ccagauacccggcaggagug

SEQ ID NO: 1465 - RNA, 20 nt, Artificial Sequence
  source: /note="Description of Artificial Sequence: Synthetic oligonucleotide"
cugggggccagauacccggc

SEQ ID NO: 1466 - RNA, 20 nt, Artificial Sequence
  source: /note="Description of Artificial Sequence: Synthetic oligonucleotide"
cagguuaggguggugagggc

SEQ ID NO: 1467 - RNA, 20 nt, Artificial Sequence
  source: /note="Description of Artificial Sequence: Synthetic oligonucleotide"
agcacgcccacagguuaggg

SEQ ID NO: 1468 - RNA, 20 nt, Artificial Sequence
  source: /note="Description of Artificial Sequence: Synthetic oligonucleotide"
gcccucaccacccuaaccug

SEQ ID NO: 1469 - RNA, 20 nt, Artificial Sequence
  source: /note="Description of Artificial Sequence: Synthetic oligonucleotide"
uguccuggucggcugggcgu

SEQ ID NO: 1470 - RNA, 20 nt, Artificial Sequence
  source: /note="Description of Artificial Sequence: Synthetic oligonucleotide"
caggaguguccuggucggcu

SEQ ID NO: 1471 - RNA, 20 nt, Artificial Sequence
  source: /note="Description of Artificial Sequence: Synthetic oligonucleotide"
gaaaggggcaguuagcaucg

SEQ ID NO: 1472 - RNA, 20 nt, Artificial Sequence
  source: /note="Description of Artificial Sequence: Synthetic oligonucleotide"
cggaugucucgugcuggcuc

SEQ ID NO: 1473 - RNA, 20 nt, Artificial Sequence
  source: /note="Description of Artificial Sequence: Synthetic oligonucleotide"
ucgcagcggaugucucgugc

SEQ ID NO: 1474 - RNA, 20 nt, Artificial Sequence
  source: /note="Description of Artificial Sequence: Synthetic oligonucleotide"
acucaccacagaacucgcag

SEQ ID NO: 1475 - RNA, 20 nt, Artificial Sequence
  source: /note="Description of Artificial Sequence: Synthetic oligonucleotide"
cacgcccauuugccgcagau

SEQ ID NO: 1476 - RNA, 20 nt, Artificial Sequence
  source: /note="Description of Artificial Sequence: Synthetic oligonucleotide"
ucacgcccauuugccgcaga

SEQ ID NO: 1477 - RNA, 20 nt, Artificial Sequence
  source: /note="Description of Artificial Sequence: Synthetic oligonucleotide"
gcgcucccaucugcggcaaa

SEQ ID NO: 1478 - RNA, 20 nt, Artificial Sequence
  source: /note="Description of Artificial Sequence: Synthetic oligonucleotide"
cgcucccaucugcggcaaau

SEQ ID NO: 1479 - RNA, 20 nt, Artificial Sequence
  source: /note="Description of Artificial Sequence: Synthetic oligonucleotide"
cucgcccaucgacacgcugc

SEQ ID NO: 1480 - RNA, 20 nt, Artificial Sequence
  source: /note="Description of Artificial Sequence: Synthetic oligonucleotide"
agguccaccaggccgagacu

SEQ ID NO: 1481 - RNA, 20 nt, Artificial Sequence
  source: /note="Description of Artificial Sequence: Synthetic oligonucleotide"
agacggacccagucucggcc

SEQ ID NO: 1482 - RNA, 20 nt, Artificial Sequence
  source: /note="Description of Artificial Sequence: Synthetic oligonucleotide"
cggacccagucucggccugg

SEQ ID NO: 1483 - RNA, 20 nt, Artificial Sequence
  source: /note="Description of Artificial Sequence: Synthetic oligonucleotide"
gguggaccucccaacccacc

SEQ ID NO: 1484 - RNA, 20 nt, Artificial Sequence
  source: /note="Description of Artificial Sequence: Synthetic oligonucleotide"
acuggaagcccgcagccccu

SEQ ID NO: 1485 - RNA, 20 nt, Artificial Sequence
  source: /note="Description of Artificial Sequence: Synthetic oligonucleotide"
accaccaccgggcagccccc

SEQ ID NO: 1486 - RNA, 20 nt, Artificial Sequence
  source: /note="Description of Artificial Sequence: Synthetic oligonucleotide"
ucgggccguaggaggaggag

SEQ ID NO: 1487 - RNA, 20 nt, Artificial Sequence
  source: /note="Description of Artificial Sequence: Synthetic oligonucleotide"
aucuuucgggccguaggagg

SEQ ID NO: 1488 - RNA, 20 nt, Artificial Sequence
  source: /note="Description of Artificial Sequence: Synthetic oligonucleotide"
aacaucuuucgggccguagg

SEQ ID NO: 1489 - RNA, 20 nt, Artificial Sequence
  source: /note="Description of Artificial Sequence: Synthetic oligonucleotide"
gggaacaucuuucgggccgu

SEQ ID NO: 1490 - RNA, 20 nt, Artificial Sequence
  source: /note="Description of Artificial Sequence: Synthetic oligonucleotide"
acggcccgaaagauguuccc

SEQ ID NO: 1491 - RNA, 20 nt, Artificial Sequence
  source: /note="Description of Artificial Sequence: Synthetic oligonucleotide"
ggggaacugcacccaucuga

SEQ ID NO: 1492 - RNA, 20 nt, Artificial Sequence
  source: /note="Description of Artificial Sequence: Synthetic oligonucleotide"
acccaucugagggucccugg

SEQ ID NO: 1493 - RNA, 20 nt, Artificial Sequence
  source: /note="Description of Artificial Sequence: Synthetic oligonucleotide"
guaagugugacccugcagua

SEQ ID NO: 1494 - RNA, 20 nt, Artificial Sequence
  source: /note="Description of Artificial Sequence: Synthetic oligonucleotide"
ggauacccccaaggggaggc

SEQ ID NO: 1495 - RNA, 20 nt, Artificial Sequence
  source: /note="Description of Artificial Sequence: Synthetic oligonucleotide"
cucuggauacccccaagggg

SEQ ID NO: 1496 - RNA, 20 nt, Artificial Sequence
  source: /note="Description of Artificial Sequence: Synthetic oligonucleotide"
ggcacucuggauacccccaa

SEQ ID NO: 1497 - RNA, 20 nt, Artificial Sequence
  source: /note="Description of Artificial Sequence: Synthetic oligonucleotide"
aggcacucuggauaccccca

SEQ ID NO: 1498 - RNA, 20 nt, Artificial Sequence
  source: /note="Description of Artificial Sequence: Synthetic oligonucleotide"
caauucaacccuaggcacuc

SEQ ID NO: 1499 - RNA, 20 nt, Artificial Sequence
  source: /note="Description of Artificial Sequence: Synthetic oligonucleotide"
uggggguauccagagugccu

SEQ ID NO: 1500 - RNA, 20 nt, Artificial Sequence
  source: /note="Description of Artificial Sequence: Synthetic oligonucleotide"
cacgcagguagagaggacac

SEQ ID NO: 1501 - RNA, 20 nt, Artificial Sequence
  source: /note="Description of Artificial Sequence: Synthetic oligonucleotide"
acgcagguagagaggacaca

SEQ ID NO: 1502 - RNA, 20 nt, Artificial Sequence
  source: /note="Description of Artificial Sequence: Synthetic oligonucleotide"
guugcaggggucugcauagc

SEQ ID NO: 1503 - RNA, 20 nt, Artificial Sequence
  source: /note="Description of Artificial Sequence: Synthetic oligonucleotide"
ugagcagcagcucaguugca

SEQ ID NO: 1504 - RNA, 20 nt, Artificial Sequence
  source: /note="Description of Artificial Sequence: Synthetic oligonucleotide"
ccacuaccaaucgauugaaa

SEQ ID NO: 1505 - RNA, 20 nt, Artificial Sequence
  source: /note="Description of Artificial Sequence: Synthetic oligonucleotide"
agucuuucucccuaggaguc

SEQ ID NO: 1506 - RNA, 20 nt, Artificial Sequence
  source: /note="Description of Artificial Sequence: Synthetic oligonucleotide"
uccuagggagaaagacugcg

SEQ ID NO: 1507 - RNA, 20 nt, Artificial Sequence
  source: /note="Description of Artificial Sequence: Synthetic oligonucleotide"
uacagcaggagcguagggac

SEQ ID NO: 1508 - RNA, 20 nt, Artificial Sequence
  source: /note="Description of Artificial Sequence: Synthetic oligonucleotide"
ggucacauaaagcuagacug

SEQ ID NO: 1509 - RNA, 20 nt, Artificial Sequence
  source: /note="Description of Artificial Sequence: Synthetic oligonucleotide"
gagcagaaugaacacagugc

SEQ ID NO: 1510 - RNA, 20 nt, Artificial Sequence
  source: /note="Description of Artificial Sequence: Synthetic oligonucleotide"
gagcgcuaaggcacaagccu

SEQ ID NO: 1511 - RNA, 20 nt, Artificial Sequence
  source: /note="Description of Artificial Sequence: Synthetic oligonucleotide"
ugagcgcuaaggcacaagcc

SEQ ID NO: 1512 - RNA, 20 nt, Artificial Sequence
  source: /note="Description of Artificial Sequence: Synthetic oligonucleotide"
cacaacacacgugagcgcua

SEQ ID NO: 1513 - RNA, 20 nt, Artificial Sequence
  source: /note="Description of Artificial Sequence: Synthetic oligonucleotide"
augggaacagcucucagcau

SEQ ID NO: 1514 - RNA, 20 nt, Artificial Sequence
  source: /note="Description of Artificial Sequence: Synthetic oligonucleotide"
aaugggaacagcucucagca

SEQ ID NO: 1515 - RNA, 20 nt, Artificial Sequence
  source: /note="Description of Artificial Sequence: Synthetic oligonucleotide"
uacuuugggacggucuaaaa

SEQ ID NO: 1516 - RNA, 20 nt, Artificial Sequence
  source: /note="Description of Artificial Sequence: Synthetic oligonucleotide"
cuaccucccaguguuacuuu

SEQ ID NO: 1517 - RNA, 20 nt, Artificial Sequence
  source: /note="Description of Artificial Sequence: Synthetic oligonucleotide"
ccuaccucccaguguuacuu

SEQ ID NO: 1518 - RNA, 20 nt, Artificial Sequence
  source: /note="Description of Artificial Sequence: Synthetic oligonucleotide"
gauaccucccuguaugaucc

SEQ ID NO: 1519 - RNA, 20 nt, Artificial Sequence
  source: /note="Description of Artificial Sequence: Synthetic oligonucleotide"
cugucacuucaaauucuagc

SEQ ID NO: 1520 - RNA, 20 nt, Artificial Sequence
  source: /note="Description of Artificial Sequence: Synthetic oligonucleotide"
ccagaggcccuuuuaacauc

SEQ ID NO: 1521 - RNA, 20 nt, Artificial Sequence
  source: /note="Description of Artificial Sequence: Synthetic oligonucleotide"
agcagguuguugcggucugg

SEQ ID NO: 1522 - RNA, 20 nt, Artificial Sequence
  source: /note="Description of Artificial Sequence: Synthetic oligonucleotide"
gcagguuguugcggucuggu

SEQ ID NO: 1523 - RNA, 20 nt, Artificial Sequence
  source: /note="Description of Artificial Sequence: Synthetic oligonucleotide"
uugcggucugguggguggug

SEQ ID NO: 1524 - RNA, 20 nt, Artificial Sequence
  source: /note="Description of Artificial Sequence: Synthetic oligonucleotide"
aggcagcuggcacugauacg

SEQ ID NO: 1525 - RNA, 20 nt, Artificial Sequence
  source: /note="Description of Artificial Sequence: Synthetic oligonucleotide"
ggcagcuggcacugauacgg

SEQ ID NO: 1526 - RNA, 20 nt, Artificial Sequence
  source: /note="Description of Artificial Sequence: Synthetic oligonucleotide"
ugauacgggggcuuugagcu

SEQ ID NO: 1527 - RNA, 20 nt, Artificial Sequence
  source: /note="Description of Artificial Sequence: Synthetic oligonucleotide"
uacgggggcuuugagcuugg

SEQ ID NO: 1528 - RNA, 20 nt, Artificial Sequence
  source: /note="Description of Artificial Sequence: Synthetic oligonucleotide"
cgcugcaggggauccagggu

SEQ ID NO: 1529 - RNA, 20 nt, Artificial Sequence
  source: /note="Description of Artificial Sequence: Synthetic oligonucleotide"
cgggacgcugcaggggaucc

SEQ ID NO: 1530 - RNA, 20 nt, Artificial Sequence
  source: /note="Description of Artificial Sequence: Synthetic oligonucleotide"
gcucugcccgggacgcugca

SEQ ID NO: 1531 - RNA, 20 nt, Artificial Sequence
  source: /note="Description of Artificial Sequence: Synthetic oligonucleotide"
ucacagcggaugucgcgcac

SEQ ID NO: 1532 - RNA, 20 nt, Artificial Sequence
  source: /note="Description of Artificial Sequence: Synthetic oligonucleotide"
gugagcgcgcgugacucgac

SEQ ID NO: 1533 - RNA, 20 nt, Artificial Sequence
  source: /note="Description of Artificial Sequence: Synthetic oligonucleotide"
cggucacacccaucugccgc

SEQ ID NO: 1534 - RNA, 20 nt, Artificial Sequence
  source: /note="Description of Artificial Sequence: Synthetic oligonucleotide"
ggcuccuucuugaugaggca

SEQ ID NO: 1535 - RNA, 20 nt, Artificial Sequence
  source: /note="Description of Artificial Sequence: Synthetic oligonucleotide"
aucaagaaggagccaccggc

SEQ ID NO: 1536 - RNA, 20 nt, Artificial Sequence
  source: /note="Description of Artificial Sequence: Synthetic oligonucleotide"
cugcacgggcccaggggcca

SEQ ID NO: 1537 - RNA, 20 nt, Artificial Sequence
  source: /note="Description of Artificial Sequence: Synthetic oligonucleotide"
cggccagccaggggcgacag

SEQ ID NO: 1538 - RNA, 20 nt, Artificial Sequence
  source: /note="Description of Artificial Sequence: Synthetic oligonucleotide"
uuugccuggccggccagcca

SEQ ID NO: 1539 - RNA, 20 nt, Artificial Sequence
  source: /note="Description of Artificial Sequence: Synthetic oligonucleotide"
cgcugucgccccuggcuggc

SEQ ID NO: 1540 - RNA, 20 nt, Artificial Sequence
  source: /note="Description of Artificial Sequence: Synthetic oligonucleotide"
agcucacgaggaaccugggc

SEQ ID NO: 1541 - RNA, 20 nt, Artificial Sequence
  source: /note="Description of Artificial Sequence: Synthetic oligonucleotide"
gcugagcucacgaggaaccu

SEQ ID NO: 1542 - RNA, 20 nt, Artificial Sequence
  source: /note="Description of Artificial Sequence: Synthetic oligonucleotide"
ggcugagcucacgaggaacc

SEQ ID NO: 1543 - RNA, 20 nt, Artificial Sequence
  source: /note="Description of Artificial Sequence: Synthetic oligonucleotide"
ggaggaggcgguccuccugc

SEQ ID NO: 1544 - RNA, 20 nt, Artificial Sequence
  source: /note="Description of Artificial Sequence: Synthetic oligonucleotide"
cgcccgcugcuuacaggagu

SEQ ID NO: 1545 - RNA, 20 nt, Artificial Sequence
  source: /note="Description of Artificial Sequence: Synthetic oligonucleotide"
ccacuccuguaagcagcggg

SEQ ID NO: 1546 - RNA, 20 nt, Artificial Sequence
  source: /note="Description of Artificial Sequence: Synthetic oligonucleotide"
uccuguaagcagcgggcggc

SEQ ID NO: 1547 - RNA, 20 nt, Artificial Sequence
  source: /note="Description of Artificial Sequence: Synthetic oligonucleotide"
ccuguaagcagcgggcggca

SEQ ID NO: 1548 - RNA, 20 nt, Artificial Sequence
  source: /note="Description of Artificial Sequence: Synthetic oligonucleotide"
uccugggagggcgaccgcca

SEQ ID NO: 1549 - RNA, 20 nt, Artificial Sequence
  source: /note="Description of Artificial Sequence: Synthetic oligonucleotide"
ugcacgcuuguggcauugcc

SEQ ID NO: 1550 - RNA, 20 nt, Artificial Sequence
  source: /note="Description of Artificial Sequence: Synthetic oligonucleotide"
ggggucagugugcacgcuug

SEQ ID NO: 1551 - RNA, 20 nt, Artificial Sequence
  source: /note="Description of Artificial Sequence: Synthetic oligonucleotide"
gcgugcacacugaccccaag

SEQ ID NO: 1552 - RNA, 20 nt, Artificial Sequence
  source: /note="Description of Artificial Sequence: Synthetic oligonucleotide"
cgugcacacugaccccaagu

SEQ ID NO: 1553 - RNA, 20 nt, Artificial Sequence
  source: /note="Description of Artificial Sequence: Synthetic oligonucleotide"
agccaugggggccccacuug

SEQ ID NO: 1554 - RNA, 20 nt, Artificial Sequence
  source: /note="Description of Artificial Sequence: Synthetic oligonucleotide"
gugcacacugaccccaagug

SEQ ID NO: 1555 - RNA, 20 nt, Artificial Sequence
  source: /note="Description of Artificial Sequence: Synthetic oligonucleotide"
gaccccaaguggggccccca

SEQ ID NO: 1556 - RNA, 20 nt, Artificial Sequence
  source: /note="Description of Artificial Sequence: Synthetic oligonucleotide"
caaguggggcccccauggcu

SEQ ID NO: 1557 - RNA, 20 nt, Artificial Sequence
  source: /note="Description of Artificial Sequence: Synthetic oligonucleotide"
ggcgggauuggcaccuggcc

SEQ ID NO: 1558 - RNA, 20 nt, Artificial Sequence
  source: /note="Description of Artificial Sequence: Synthetic oligonucleotide"
agggggcaggugcacccaga

SEQ ID NO: 1559 - RNA, 20 nt, Artificial Sequence
  source: /note="Description of Artificial Sequence: Synthetic oligonucleotide"
agucacagcccaaagggggc

SEQ ID NO: 1560 - RNA, 20 nt, Artificial Sequence
  source: /note="Description of Artificial Sequence: Synthetic oligonucleotide"
ugggugcaccugcccccuuu

SEQ ID NO: 1561 - RNA, 20 nt, Artificial Sequence
  source: /note="Description of Artificial Sequence: Synthetic oligonucleotide"
gcugagucacagcccaaagg

SEQ ID NO: 1562 - RNA, 20 nt, Artificial Sequence
  source: /note="Description of Artificial Sequence: Synthetic oligonucleotide"
ugcugagucacagcccaaag

SEQ ID NO: 1563 - RNA, 20 nt, Artificial Sequence
  source: /note="Description of Artificial Sequence: Synthetic oligonucleotide"
cugcugagucacagcccaaa

SEQ ID NO: 1564 - RNA, 20 nt, Artificial Sequence
  source: /note="Description of Artificial Sequence: Synthetic oligonucleotide"
ccuugcgguuuucaaaguaa

SEQ ID NO: 1565 - RNA, 20 nt, Artificial Sequence
  source: /note="Description of Artificial Sequence: Synthetic oligonucleotide"
cgggcacaccugcggcaguu

SEQ ID NO: 1566 - RNA, 20 nt, Artificial Sequence
  source: /note="Description of Artificial Sequence: Synthetic oligonucleotide"
ccaucgagacacugagcgag

SEQ ID NO: 1567 - RNA, 20 nt, Artificial Sequence
  source: /note="Description of Artificial Sequence: Synthetic oligonucleotide"
ugagcgaguggaucaaacac

SEQ ID NO: 1568 - RNA, 20 nt, Artificial Sequence
  source: /note="Description of Artificial Sequence: Synthetic oligonucleotide"
cgccuaccgcagcuacaucc

SEQ ID NO: 1569 - RNA, 20 nt, Artificial Sequence
  source: /note="Description of Artificial Sequence: Synthetic oligonucleotide"
gccuaccgcagcuacaucca

SEQ ID NO: 1570 - RNA, 20 nt, Artificial Sequence
  source: /note="Description of Artificial Sequence: Synthetic oligonucleotide"
ggaacuucuuggugaagggg

SEQ ID NO: 1571 - RNA, 20 nt, Artificial Sequence
  source: /note="Description of Artificial Sequence: Synthetic oligonucleotide"
cacugcggccgaccacggcc

SEQ ID NO: 1572 - RNA, 20 nt, Artificial Sequence
  source: /note="Description of Artificial Sequence: Synthetic oligonucleotide"
uccggcacugcggccgacca

SEQ ID NO: 1573 - RNA, 20 nt, Artificial Sequence
  source: /note="Description of Artificial Sequence: Synthetic oligonucleotide"
gccguggucggccgcagugc

SEQ ID NO: 1574 - RNA, 20 nt, Artificial Sequence
  source: /note="Description of Artificial Sequence: Synthetic oligonucleotide"
guggucggccgcagugccgg

SEQ ID NO: 1575 - RNA, 20 nt, Artificial Sequence
  source: /note="Description of Artificial Sequence: Synthetic oligonucleotide"
uggucggccgcagugccgga

SEQ ID NO: 1576 - RNA, 20 nt, Artificial Sequence
  source: /note="Description of Artificial Sequence: Synthetic oligonucleotide"
ggucggccgcagugccggag

SEQ ID NO: 1577 - RNA, 20 nt, Artificial Sequence
  source: /note="Description of Artificial Sequence: Synthetic oligonucleotide"
cucgggcccuggcuccccuc

SEQ ID NO: 1578 - RNA, 20 nt, Artificial Sequence
  source: /note="Description of Artificial Sequence: Synthetic oligonucleotide"
gcucaccaccgucggcugcc

SEQ ID NO: 1579 - RNA, 20 nt, Artificial Sequence
  source: /note="Description of Artificial Sequence: Synthetic oligonucleotide"
cagaggccgcucaccaccgu

SEQ ID NO: 1580 - RNA, 20 nt, Artificial Sequence
  source: /note="Description of Artificial Sequence: Synthetic oligonucleotide"
cgacgguggugagcggccuc

SEQ ID NO: 1581 - RNA, 20 nt, Artificial Sequence
  source: /note="Description of Artificial Sequence: Synthetic oligonucleotide"
cacuguugauguucugccgc

SEQ ID NO: 1582 - RNA, 20 nt, Artificial Sequence
  source: /note="Description of Artificial Sequence: Synthetic oligonucleotide"
caucaacagugagugcuugg

SEQ ID NO: 1583 - RNA, 20 nt, Artificial Sequence
  source: /note="Description of Artificial Sequence: Synthetic oligonucleotide"
aggagggucgggagcgcagc

SEQ ID NO: 1584 - RNA, 20 nt, Artificial Sequence
  source: /note="Description of Artificial Sequence: Synthetic oligonucleotide"
acuccccaggcgcucugcug

SEQ ID NO: 1585 - RNA, 20 nt, Artificial Sequence
  source: /note="Description of Artificial Sequence: Synthetic oligonucleotide"
acugaugcuaccuggauggg

SEQ ID NO: 1586 - RNA, 20 nt, Artificial Sequence
  source: /note="Description of Artificial Sequence: Synthetic oligonucleotide"
aggacugaugcuaccuggau

SEQ ID NO: 1587 - RNA, 20 nt, Artificial Sequence
  source: /note="Description of Artificial Sequence: Synthetic oligonucleotide"
gaggacugaugcuaccugga

SEQ ID NO: 1588 - RNA, 20 nt, Artificial Sequence
  source: /note="Description of Artificial Sequence: Synthetic oligonucleotide"
agcugaggacugaugcuacc

SEQ ID NO: 1589 - RNA, 20 nt, Artificial Sequence
  source: /note="Description of Artificial Sequence: Synthetic oligonucleotide"
cuuggaauacacaagagcug

SEQ ID NO: 1590 - RNA, 20 nt, Artificial Sequence
  source: /note="Description of Artificial Sequence: Synthetic oligonucleotide"
uucaaauucuaagguggaga

SEQ ID NO: 1591 - RNA, 20 nt, Artificial Sequence
  source: /note="Description of Artificial Sequence: Synthetic oligonucleotide"
uugucggcguucaaauucua

SEQ ID NO: 1592 - RNA, 20 nt, Artificial Sequence
  source: /note="Description of Artificial Sequence: Synthetic oligonucleotide"
ugcggaggcaucuggagggc

SEQ ID NO: 1593 - RNA, 20 nt, Artificial Sequence
  source: /note="Description of Artificial Sequence: Synthetic oligonucleotide"
gacuggccggacucggggug

SEQ ID NO: 1594 - RNA, 20 nt, Artificial Sequence
  source: /note="Description of Artificial Sequence: Synthetic oligonucleotide"
ggacuggccggacucggggu

SEQ ID NO: 1595 - RNA, 20 nt, Artificial Sequence
  source: /note="Description of Artificial Sequence: Synthetic oligonucleotide"
gaggggacuggccggacucg

SEQ ID NO: 1596 - RNA, 20 nt, Artificial Sequence
  source: /note="Description of Artificial Sequence: Synthetic oligonucleotide"
agugaugucugggggggccg

SEQ ID NO: 1597 - RNA, 20 nt, Artificial Sequence
  source: /note="Description of Artificial Sequence: Synthetic oligonucleotide"
aagugaugucugggggggcc

SEQ ID NO: 1598 - RNA, 20 nt, Artificial Sequence
  source: /note="Description of Artificial Sequence: Synthetic oligonucleotide"
caagugaugucugggggggc

SEQ ID NO: 1599 - RNA, 20 nt, Artificial Sequence
  source: /note="Description of Artificial Sequence: Synthetic oligonucleotide"
acuugacaagugaugucugg

SEQ ID NO: 1600 - RNA, 20 nt, Artificial Sequence
  source: /note="Description of Artificial Sequence: Synthetic oligonucleotide"
cgaacuugacaagugauguc

SEQ ID NO: 1601 - RNA, 20 nt, Artificial Sequence
  source: /note="Description of Artificial Sequence: Synthetic oligonucleotide"
gggcagccuaccugcauuug

SEQ ID NO: 1602 - RNA, 20 nt, Artificial Sequence
  source: /note="Description of Artificial Sequence: Synthetic oligonucleotide"
acaucuacacccucaaaugc

SEQ ID NO: 1603 - RNA, 20 nt, Artificial Sequence
  source: /note="Description of Artificial Sequence: Synthetic oligonucleotide"
cuacacccucaaaugcaggu

SEQ ID NO: 1604 - RNA, 20 nt, Artificial Sequence
  source: /note="Description of Artificial Sequence: Synthetic oligonucleotide"
aaaugcagguaggcugcccc

SEQ ID NO: 1605 - RNA, 20 nt, Artificial Sequence
  source: /note="Description of Artificial Sequence: Synthetic oligonucleotide"
augcagguaggcugccccug

SEQ ID NO: 1606 - RNA, 20 nt, Artificial Sequence
  source: /note="Description of Artificial Sequence: Synthetic oligonucleotide"
gugaccaagguccacucagg

SEQ ID NO: 1607 - RNA, 20 nt, Artificial Sequence
  source: /note="Description of Artificial Sequence: Synthetic oligonucleotide"
cgggugaccaagguccacuc

SEQ ID NO: 1608 - RNA, 20 nt, Artificial Sequence
  source: /note="Description of Artificial Sequence: Synthetic oligonucleotide"
uccaaggcuccgggugacca

SEQ ID NO: 1609 - RNA, 20 nt, Artificial Sequence
  source: /note="Description of Artificial Sequence: Synthetic oligonucleotide"
cuauccuguuccaaggcucc

SEQ ID NO: 1610 - RNA, 20 nt, Artificial Sequence
  source: /note="Description of Artificial Sequence: Synthetic oligonucleotide"
ccuauccuguuccaaggcuc

SEQ ID NO: 1611 - RNA, 20 nt, Artificial Sequence
  source: /note="Description of Artificial Sequence: Synthetic oligonucleotide"
gucacccggagccuuggaac

SEQ ID NO: 1612 - RNA, 20 nt, Artificial Sequence
  source: /note="Description of Artificial Sequence: Synthetic oligonucleotide"
ccggagccuuggaacaggau

SEQ ID NO: 1613 - RNA, 20 nt, Artificial Sequence
  source: /note="Description of Artificial Sequence: Synthetic oligonucleotide"
cggagccuuggaacaggaua

SEQ ID NO: 1614 - RNA, 20 nt, Artificial Sequence
  source: /note="Description of Artificial Sequence: Synthetic oligonucleotide"
ccuuggaacaggauaggguu

SEQ ID NO: 1615 - RNA, 20 nt, Artificial Sequence
  source: /note="Description of Artificial Sequence: Synthetic oligonucleotide"
uggaacaggauaggguuugg

SEQ ID NO: 1616 - RNA, 20 nt, Artificial Sequence
  source: /note="Description of Artificial Sequence: Synthetic oligonucleotide"
cuccucguaacaaaucugua

SEQ ID NO: 1617 - RNA, 20 nt, Artificial Sequence
  source: /note="Description of Artificial Sequence: Synthetic oligonucleotide"
gcugcucuucaauguacuug

SEQ ID NO: 1618 - RNA, 20 nt, Artificial Sequence
  source: /note="Description of Artificial Sequence: Synthetic oligonucleotide"
gacuuggccuguauggccuc

SEQ ID NO: 1619 - RNA, 20 nt, Artificial Sequence
  source: /note="Description of Artificial Sequence: Synthetic oligonucleotide"
gacuucugacuuggccugua

SEQ ID NO: 1620 - RNA, 20 nt, Artificial Sequence
  source: /note="Description of Artificial Sequence: Synthetic oligonucleotide"
gguggggggcuuggugcguu

SEQ ID NO: 1621 - RNA, 20 nt, Artificial Sequence
  source: /note="Description of Artificial Sequence: Synthetic oligonucleotide"
gggggcuuggugcguugggu

SEQ ID NO: 1622 - RNA, 20 nt, Artificial Sequence
  source: /note="Description of Artificial Sequence: Synthetic oligonucleotide"
cauagaaucugagacaguag

SEQ ID NO: 1623 - RNA, 20 nt, Artificial Sequence
  source: /note="Description of Artificial Sequence: Synthetic oligonucleotide"
cuauguaucugccagauggc

SEQ ID NO: 1624 - RNA, 20 nt, Artificial Sequence
  source: /note="Description of Artificial Sequence: Synthetic oligonucleotide"
uuccagguaccccugccauc

SEQ ID NO: 1625 - RNA, 20 nt, Artificial Sequence
  source: /note="Description of Artificial Sequence: Synthetic oligonucleotide"
uggugccagguaagggcuac

SEQ ID NO: 1626 - RNA, 20 nt, Artificial Sequence
  source: /note="Description of Artificial Sequence: Synthetic oligonucleotide"
gaagucacuggugccaggua

SEQ ID NO: 1627 - RNA, 20 nt, Artificial Sequence
  source: /note="Description of Artificial Sequence: Synthetic oligonucleotide"
cuccacucaccaugggguca

SEQ ID NO: 1628 - RNA, 20 nt, Artificial Sequence
  source: /note="Description of Artificial Sequence: Synthetic oligonucleotide"
ugaguggagguggcugucca

SEQ ID NO: 1629 - RNA, 20 nt, Artificial Sequence
  source: /note="Description of Artificial Sequence: Synthetic oligonucleotide"
cagaagucaggcguuuccca

SEQ ID NO: 1630 - RNA, 20 nt, Artificial Sequence
  source: /note="Description of Artificial Sequence: Synthetic oligonucleotide"
caugggaaacgccugacuuc

SEQ ID NO: 1631 - RNA, 20 nt, Artificial Sequence
  source: /note="Description of Artificial Sequence: Synthetic oligonucleotide"
augggaaacgccugacuucu

SEQ ID NO: 1632 - RNA, 20 nt, Artificial Sequence
  source: /note="Description of Artificial Sequence: Synthetic oligonucleotide"
cccucuccauccaggaagag

SEQ ID NO: 1633 - RNA, 20 nt, Artificial Sequence
  source: /note="Description of Artificial Sequence: Synthetic oligonucleotide"
caaagcggaccccccaccug

SEQ ID NO: 1634 - RNA, 20 nt, Artificial Sequence
  source: /note="Description of Artificial Sequence: Synthetic oligonucleotide"
ccccccaccugaggaguccc

SEQ ID NO: 1635 - RNA, 20 nt, Artificial Sequence
  source: /note="Description of Artificial Sequence: Synthetic oligonucleotide"
cgccgcugucugugccugcg

SEQ ID NO: 1636 - RNA, 20 nt, Artificial Sequence
  source: /note="Description of Artificial Sequence: Synthetic oligonucleotide"
ccccaaggggcgccgguuug

SEQ ID NO: 1637 - RNA, 20 nt, Artificial Sequence
  source: /note="Description of Artificial Sequence: Synthetic oligonucleotide"
aaccucaaaccggcgccccu

SEQ ID NO: 1638 - RNA, 20 nt, Artificial Sequence
  source: /note="Description of Artificial Sequence: Synthetic oligonucleotide"
ccucaaaccggcgccccuug

SEQ ID NO: 1639 - RNA, 20 nt, Artificial Sequence
  source: /note="Description of Artificial Sequence: Synthetic oligonucleotide"
cucaaaccggcgccccuugg

SEQ ID NO: 1640 - RNA, 20 nt, Artificial Sequence
  source: /note="Description of Artificial Sequence: Synthetic oligonucleotide"
aaccggcgccccuugggggc

SEQ ID NO: 1641 - RNA, 20 nt, Artificial Sequence
  source: /note="Description of Artificial Sequence: Synthetic oligonucleotide"
accggcgccccuugggggcc

SEQ ID NO: 1642 - RNA, 20 nt, Artificial Sequence
  source: /note="Description of Artificial Sequence: Synthetic oligonucleotide"
cgcccuggcuguagugugcc

SEQ ID NO: 1643 - RNA, 20 nt, Artificial Sequence
  source: /note="Description of Artificial Sequence: Synthetic oligonucleotide"
cccccagcccgaggacucug

SEQ ID NO: 1644 - RNA, 20 nt, Artificial Sequence
  source: /note="Description of Artificial Sequence: Synthetic oligonucleotide"
cccgaggacucuggggccac

SEQ ID NO: 1645 - RNA, 20 nt, Artificial Sequence
  source: /note="Description of Artificial Sequence: Synthetic oligonucleotide"
ccgaggacucuggggccaca

SEQ ID NO: 1646 - RNA, 20 nt, Artificial Sequence
  source: /note="Description of Artificial Sequence: Synthetic oligonucleotide"
accggcugccaucagagacc

SEQ ID NO: 1647 - RNA, 20 nt, Artificial Sequence
  source: /note="Description of Artificial Sequence: Synthetic oligonucleotide"
ggggucuuugcaaauggcca

SEQ ID NO: 1648 - RNA, 20 nt, Artificial Sequence
  source: /note="Description of Artificial Sequence: Synthetic oligonucleotide"
ugaacgaccacaucaugcca

SEQ ID NO: 1649 - RNA, 20 nt, Artificial Sequence
  source: /note="Description of Artificial Sequence: Synthetic oligonucleotide"
agcucugagcucuucccagc

SEQ ID NO: 1650 - RNA, 20 nt, Artificial Sequence
  source: /note="Description of Artificial Sequence: Synthetic oligonucleotide"
uuggggggccuugacauggc

SEQ ID NO: 1651 - RNA, 20 nt, Artificial Sequence
  source: /note="Description of Artificial Sequence: Synthetic oligonucleotide"
cucuuuggggggccuugaca

SEQ ID NO: 1652 - RNA, 20 nt, Artificial Sequence
  source: /note="Description of Artificial Sequence: Synthetic oligonucleotide"
agccccugaggcucuuuggg

SEQ ID NO: 1653 - RNA, 20 nt, Artificial Sequence
  source: /note="Description of Artificial Sequence: Synthetic oligonucleotide"
agagccccugaggcucuuug

SEQ ID NO: 1654 - RNA, 20 nt, Artificial Sequence
  source: /note="Description of Artificial Sequence: Synthetic oligonucleotide"
ccagagccccugaggcucuu

SEQ ID NO: 1655 - RNA, 20 nt, Artificial Sequence
  source: /note="Description of Artificial Sequence: Synthetic oligonucleotide"
ggccccccaaagagccucag

SEQ ID NO: 1656 - RNA, 20 nt, Artificial Sequence
  source: /note="Description of Artificial Sequence: Synthetic oligonucleotide"
cgcguuuuguguagagaaua

SEQ ID NO: 1657 - RNA, 20 nt, Artificial Sequence
  source: /note="Description of Artificial Sequence: Synthetic oligonucleotide"
cacgcuggccgccugcccca

SEQ ID NO: 1658 - RNA, 20 nt, Artificial Sequence
  source: /note="Description of Artificial Sequence: Synthetic oligonucleotide"
uucuggaaacacccuggggc

SEQ ID NO: 1659 - RNA, 20 nt, Artificial Sequence
  source: /note="Description of Artificial Sequence: Synthetic oligonucleotide"
gcguguguuuuucugucaag

SEQ ID NO: 1660 - RNA, 20 nt, Artificial Sequence
  source: /note="Description of Artificial Sequence: Synthetic oligonucleotide"
uguuuuucugucaaguggac

SEQ ID NO: 1661 - RNA, 20 nt, Artificial Sequence
  source: /note="Description of Artificial Sequence: Synthetic oligonucleotide"
auuggcuggcagccggggcu

SEQ ID NO: 1662 - RNA, 20 nt, Artificial Sequence
  source: /note="Description of Artificial Sequence: Synthetic oligonucleotide"
cauggcgcucuggacagagg

SEQ ID NO: 1663 - RNA, 20 nt, Artificial Sequence
  source: /note="Description of Artificial Sequence: Synthetic oligonucleotide"
cuccauggcgcucuggacag

SEQ ID NO: 1664 - RNA, 20 nt, Artificial Sequence
  source: /note="Description of Artificial Sequence: Synthetic oligonucleotide"
cucuguccagagcgccaugg

SEQ ID NO: 1665 - RNA, 20 nt, Artificial Sequence
  source: /note="Description of Artificial Sequence: Synthetic oligonucleotide"
gcggccaacuggaaaaccca

SEQ ID NO: 1666 - RNA, 20 nt, Artificial Sequence
  source: /note="Description of Artificial Sequence: Synthetic oligonucleotide"
ggcggccaacuggaaaaccc

SEQ ID NO: 1667 - RNA, 20 nt, Artificial Sequence
  source: /note="Description of Artificial Sequence: Synthetic oligonucleotide"
gaggcccuggguuuuccagu

SEQ ID NO: 1668 - RNA, 20 nt, Artificial Sequence
  source: /note="Description of Artificial Sequence: Synthetic oligonucleotide"
uggucggcuuggcggccaac

SEQ ID NO: 1669 - RNA, 20 nt, Artificial Sequence
  source: /note="Description of Artificial Sequence: Synthetic oligonucleotide"
gcugcgucuggucggcuugg

SEQ ID NO: 1670 - RNA, 20 nt, Artificial Sequence
  source: /note="Description of Artificial Sequence: Synthetic oligonucleotide"
ccagcugcgucuggucggcu

SEQ ID NO: 1671 - RNA, 20 nt, Artificial Sequence
  source: /note="Description of Artificial Sequence: Synthetic oligonucleotide"
cauccccagcugcgucuggu

SEQ ID NO: 1672 - RNA, 20 nt, Artificial Sequence
  source: /note="Description of Artificial Sequence: Synthetic oligonucleotide"
ccaagccgaccagacgcagc

SEQ ID NO: 1673 - RNA, 20 nt, Artificial Sequence
  source: /note="Description of Artificial Sequence: Synthetic oligonucleotide"
caagccgaccagacgcagcu

SEQ ID NO: 1674 - RNA, 20 nt, Artificial Sequence
  source: /note="Description of Artificial Sequence: Synthetic oligonucleotide"
aagccgaccagacgcagcug

SEQ ID NO: 1675 - RNA, 20 nt, Artificial Sequence
  source: /note="Description of Artificial Sequence: Synthetic oligonucleotide"
agagccaacagcugggaacu

SEQ ID NO: 1676 - RNA, 20 nt, Artificial Sequence
  source: /note="Description of Artificial Sequence: Synthetic oligonucleotide"
ggccuaaagagccaacagcu

SEQ ID NO: 1677 - RNA, 20 nt, Artificial Sequence
  source: /note="Description of Artificial Sequence: Synthetic oligonucleotide"
gcuguuggcucuuuaggcca

SEQ ID NO: 1678 - RNA, 20 nt, Artificial Sequence
  source: /note="Description of Artificial Sequence: Synthetic oligonucleotide"
cucuuuaggccauggcuggg

SEQ ID NO: 1679 - RNA, 20 nt, Artificial Sequence
  source: /note="Description of Artificial Sequence: Synthetic oligonucleotide"
acccugguucaucugcucac

SEQ ID NO: 1680 - RNA, 20 nt, Artificial Sequence
  source: /note="Description of Artificial Sequence: Synthetic oligonucleotide"
ggguucugggcagccugucu

SEQ ID NO: 1681 - RNA, 20 nt, Artificial Sequence
  source: /note="Description of Artificial Sequence: Synthetic oligonucleotide"
ccucaacugcuucuugaucc

SEQ ID NO: 1682 - RNA, 20 nt, Artificial Sequence
  source: /note="Description of Artificial Sequence: Synthetic oligonucleotide"
ccaggaucaagaagcaguug

SEQ ID NO: 1683 - RNA, 20 nt, Artificial Sequence
  source: /note="Description of Artificial Sequence: Synthetic oligonucleotide"
aggcuagaggagcuuaucaa

SEQ ID NO: 1684 - RNA, 20 nt, Artificial Sequence
  source: /note="Description of Artificial Sequence: Synthetic oligonucleotide"
uagaggagcuuaucaaaggc

SEQ ID NO: 1685 - RNA, 20 nt, Artificial Sequence
  source: /note="Description of Artificial Sequence: Synthetic oligonucleotide"
aaaggcaggagcuaccagcg

SEQ ID NO: 1686 - RNA, 20 nt, Artificial Sequence
  source: /note="Description of Artificial Sequence: Synthetic oligonucleotide"
aaggcaggagcuaccagcga

SEQ ID NO: 1687 - RNA, 20 nt, Artificial Sequence
  source: /note="Description of Artificial Sequence: Synthetic oligonucleotide"
gagcuaccagcgaggguguc

SEQ ID NO: 1688 - RNA, 20 nt, Artificial Sequence
  source: /note="Description of Artificial Sequence: Synthetic oligonucleotide"
cgagggugucagggacccgu

SEQ ID NO: 1689 - RNA, 20 nt, Artificial Sequence
  source: /note="Description of Artificial Sequence: Synthetic oligonucleotide"
gagggugucagggacccguu

SEQ ID NO: 1690 - RNA, 20 nt, Artificial Sequence
  source: /note="Description of Artificial Sequence: Synthetic oligonucleotide"
agggacccguugggagcauu

SEQ ID NO: 1691 - RNA, 20 nt, Artificial Sequence
  source: /note="Description of Artificial Sequence: Synthetic oligonucleotide"
gggacccguugggagcauuu

SEQ ID NO: 1692 - RNA, 20 nt, Artificial Sequence
  source: /note="Description of Artificial Sequence: Synthetic oligonucleotide"
acccguugggagcauuuggg

SEQ ID NO: 1693 - RNA, 20 nt, Artificial Sequence
  source: /note="Description of Artificial Sequence: Synthetic oligonucleotide"
cccguugggagcauuugggu

SEQ ID NO: 1694 - RNA, 20 nt, Artificial Sequence
  source: /note="Description of Artificial Sequence: Synthetic oligonucleotide"
ccguugggagcauuugggug

SEQ ID NO: 1695 - RNA, 20 nt, Artificial Sequence
  source: /note="Description of Artificial Sequence: Synthetic oligonucleotide"
ccagugggguuguagagagc

SEQ ID NO: 1696 - RNA, 20 nt, Artificial Sequence
  source: /note="Description of Artificial Sequence: Synthetic oligonucleotide"
ccgcauguuccuugggucag

SEQ ID NO: 1697 - RNA, 20 nt, Artificial Sequence
  source: /note="Description of Artificial Sequence: Synthetic oligonucleotide"
cuuuuccccgcauguuccuu

SEQ ID NO: 1698 - RNA, 20 nt, Artificial Sequence
  source: /note="Description of Artificial Sequence: Synthetic oligonucleotide"
ucuuuuccccgcauguuccu

SEQ ID NO: 1699 - RNA, 20 nt, Artificial Sequence
  source: /note="Description of Artificial Sequence: Synthetic oligonucleotide"
ccccugacccaaggaacaug

SEQ ID NO: 1700 - RNA, 20 nt, Artificial Sequence
  source: /note="Description of Artificial Sequence: Synthetic oligonucleotide"
aaggaacaugcggggaaaag

SEQ ID NO: 1701 - RNA, 20 nt, Artificial Sequence
  source: /note="Description of Artificial Sequence: Synthetic oligonucleotide"
uaacaucgcaaaggagccag

SEQ ID NO: 1702 - RNA, 20 nt, Artificial Sequence
  source: /note="Description of Artificial Sequence: Synthetic oligonucleotide"
uccuucuuguuuauugcaug

SEQ ID NO: 1703 - RNA, 20 nt, Artificial Sequence
  source: /note="Description of Artificial Sequence: Synthetic oligonucleotide"
agcucaucguuuuuacuaaa

SEQ ID NO: 1704 - RNA, 20 nt, Artificial Sequence
  source: /note="Description of Artificial Sequence: Synthetic oligonucleotide"
uuuacuaaacggucaagugc

SEQ ID NO: 1705 - RNA, 20 nt, Artificial Sequence
  source: /note="Description of Artificial Sequence: Synthetic oligonucleotide"
ggagagugggaacgaccuca

SEQ ID NO: 1706 - RNA, 20 nt, Artificial Sequence
  source: /note="Description of Artificial Sequence: Synthetic oligonucleotide"
ccuucuguccacacgccaug

SEQ ID NO: 1707 - RNA, 20 nt, Artificial Sequence
  source: /note="Description of Artificial Sequence: Synthetic oligonucleotide"
gggaacgaccucauggcgug

SEQ ID NO: 1708 - RNA, 20 nt, Artificial Sequence
  source: /note="Description of Artificial Sequence: Synthetic oligonucleotide"
ucauggcguguggacagaag

SEQ ID NO: 1709 - RNA, 20 nt, Artificial Sequence
  source: /note="Description of Artificial Sequence: Synthetic oligonucleotide"
uucccaggaagggguauggu

SEQ ID NO: 1710 - RNA, 20 nt, Artificial Sequence
  source: /note="Description of Artificial Sequence: Synthetic oligonucleotide"
aggcugcaauaacgcccaca

SEQ ID NO: 1711 - RNA, 20 nt, Artificial Sequence
  source: /note="Description of Artificial Sequence: Synthetic oligonucleotide"
ggcugcaauaacgcccacaa

SEQ ID NO: 1712 - RNA, 20 nt, Artificial Sequence
  source: /note="Description of Artificial Sequence: Synthetic oligonucleotide"
ugggccaagaccacccuugu

SEQ ID NO: 1713 - RNA, 20 nt, Artificial Sequence
  source: /note="Description of Artificial Sequence: Synthetic oligonucleotide"
gugggccaagaccacccuug

SEQ ID NO: 1714 - RNA, 20 nt, Artificial Sequence
  source: /note="Description of Artificial Sequence: Synthetic oligonucleotide"
aacgcccacaaggguggucu

SEQ ID NO: 1715 - RNA, 20 nt, Artificial Sequence
  source: /note="Description of Artificial Sequence: Synthetic oligonucleotide"
ccccacaggagcagacgugu

SEQ ID NO: 1716 - RNA, 20 nt, Artificial Sequence
  source: /note="Description of Artificial Sequence: Synthetic oligonucleotide"
cccacacgucugcuccugug

SEQ ID NO: 1717 - RNA, 20 nt, Artificial Sequence
  source: /note="Description of Artificial Sequence: Synthetic oligonucleotide"
gaugugcguccugaccccac

SEQ ID NO: 1718 - RNA, 20 nt, Artificial Sequence
  source: /note="Description of Artificial Sequence: Synthetic oligonucleotide"
acgucugcuccugugggguc

SEQ ID NO: 1719 - RNA, 20 nt, Artificial Sequence
  source: /note="Description of Artificial Sequence: Synthetic oligonucleotide"
gucaggacgcacaucucgcc

SEQ ID NO: 1720 - RNA, 20 nt, Artificial Sequence
  source: /note="Description of Artificial Sequence: Synthetic oligonucleotide"
aggacgcacaucucgccugg

SEQ ID NO: 1721 - RNA, 20 nt, Artificial Sequence
  source: /note="Description of Artificial Sequence: Synthetic oligonucleotide"
gguugcggccuucugccacc

SEQ ID NO: 1722 - RNA, 20 nt, Artificial Sequence
  source: /note="Description of Artificial Sequence: Synthetic oligonucleotide"
acaucucgccugguggcaga

SEQ ID NO: 1723 - RNA, 20 nt, Artificial Sequence
  source: /note="Description of Artificial Sequence: Synthetic oligonucleotide"
guauccaggacuuaggaagc

SEQ ID NO: 1724 - RNA, 20 nt, Artificial Sequence
  source: /note="Description of Artificial Sequence: Synthetic oligonucleotide"
uauccaggacuuaggaagca

SEQ ID NO: 1725 - RNA, 20 nt, Artificial Sequence
  source: /note="Description of Artificial Sequence: Synthetic oligonucleotide"
caucuugugagcugacucaa

SEQ ID NO: 1726 - RNA, 20 nt, Artificial Sequence
  source: /note="Description of Artificial Sequence: Synthetic oligonucleotide"
ucacugcaugauuggugggg

SEQ ID NO: 1727 - RNA, 20 nt, Artificial Sequence
  source: /note="Description of Artificial Sequence: Synthetic oligonucleotide"
acuucacugcaugauuggug

SEQ ID NO: 1728 - RNA, 20 nt, Artificial Sequence
  source: /note="Description of Artificial Sequence: Synthetic oligonucleotide"
cacuucacugcaugauuggu

SEQ ID NO: 1729 - RNA, 20 nt, Artificial Sequence
  source: /note="Description of Artificial Sequence: Synthetic oligonucleotide"
ucacuucacugcaugauugg

SEQ ID NO: 1730 - RNA, 20 nt, Artificial Sequence
  source: /note="Description of Artificial Sequence: Synthetic oligonucleotide"
accaaucaugcagugaagug

SEQ ID NO: 1731 - RNA, 20 nt, Artificial Sequence
  source: /note="Description of Artificial Sequence: Synthetic oligonucleotide"
ccaaucaugcagugaaguga

SEQ ID NO: 1732 - RNA, 20 nt, Artificial Sequence
  source: /note="Description of Artificial Sequence: Synthetic oligonucleotide"
gugagggucauguguguccu

SEQ ID NO: 1733 - RNA, 20 nt, Artificial Sequence
  source: /note="Description of Artificial Sequence: Synthetic oligonucleotide"
gucaccuccaguucuugcag

SEQ ID NO: 1734 - RNA, 20 nt, Artificial Sequence
  source: /note="Description of Artificial Sequence: Synthetic oligonucleotide"
agcaaugcucagaaaguuuu

SEQ ID NO: 1735 - RNA, 20 nt, Artificial Sequence
  source: /note="Description of Artificial Sequence: Synthetic oligonucleotide"
cugccugagguguauugaag

SEQ ID NO: 1736 - RNA, 20 nt, Artificial Sequence
  source: /note="Description of Artificial Sequence: Synthetic oligonucleotide"
aagucucagcuuuugagccg

SEQ ID NO: 1737 - RNA, 20 nt, Artificial Sequence
  source: /note="Description of Artificial Sequence: Synthetic oligonucleotide"
cuuuugagccguggucucug

SEQ ID NO: 1738 - RNA, 20 nt, Artificial Sequence
  source: /note="Description of Artificial Sequence: Synthetic oligonucleotide"
uuuugagccguggucucuga

SEQ ID NO: 1739 - RNA, 20 nt, Artificial Sequence
  source: /note="Description of Artificial Sequence: Synthetic oligonucleotide"
aaucgguacaaugaugacug

SEQ ID NO: 1740 - RNA, 20 nt, Artificial Sequence
  source: /note="Description of Artificial Sequence: Synthetic oligonucleotide"
cgaugaaggaacgaaccugc

SEQ ID NO: 1741 - RNA, 20 nt, Artificial Sequence
  source: /note="Description of Artificial Sequence: Synthetic oligonucleotide"
gaugaaggaacgaaccugca

SEQ ID NO: 1742 - RNA, 20 nt, Artificial Sequence
  source: /note="Description of Artificial Sequence: Synthetic oligonucleotide"
acacgucuucugcgcccugc

SEQ ID NO: 1743 - RNA, 20 nt, Artificial Sequence
  source: /note="Description of Artificial Sequence: Synthetic oligonucleotide"
agggcgcagaagacgugucc

SEQ ID NO: 1744 - RNA, 20 nt, Artificial Sequence
  source: /note="Description of Artificial Sequence: Synthetic oligonucleotide"
ggcgcagaagacguguccug

SEQ ID NO: 1745 - RNA, 20 nt, Artificial Sequence
  source: /note="Description of Artificial Sequence: Synthetic oligonucleotide"
ccugucuuccaaaccaaggc

SEQ ID NO: 1746 - RNA, 20 nt, Artificial Sequence
  source: /note="Description of Artificial Sequence: Synthetic oligonucleotide"
ggauaagcacucuggcuucg

SEQ ID NO: 1747 - RNA, 20 nt, Artificial Sequence
  source: /note="Description of Artificial Sequence: Synthetic oligonucleotide"
cggauaagcacucuggcuuc

SEQ ID NO: 1748 - RNA, 20 nt, Artificial Sequence
  source: /note="Description of Artificial Sequence: Synthetic oligonucleotide"
acggauaagcacucuggcuu

SEQ ID NO: 1749 - RNA, 20 nt, Artificial Sequence
  source: /note="Description of Artificial Sequence: Synthetic oligonucleotide"
gaucugacggauaagcacuc

SEQ ID NO: 1750 - RNA, 20 nt, Artificial Sequence
  source: /note="Description of Artificial Sequence: Synthetic oligonucleotide"
ucagaucucugcuucauguu

SEQ ID NO: 1751 - RNA, 20 nt, Artificial Sequence
  source: /note="Description of Artificial Sequence: Synthetic oligonucleotide"
agaaguggcuuuguuccgua

SEQ ID NO: 1752 - RNA, 20 nt, Artificial Sequence
  source: /note="Description of Artificial Sequence: Synthetic oligonucleotide"
cugcagaacuugcugccaua

SEQ ID NO: 1753 - RNA, 20 nt, Artificial Sequence
  source: /note="Description of Artificial Sequence: Synthetic oligonucleotide"
aaacuccccccacccaaaug

SEQ ID NO: 1754 - RNA, 20 nt, Artificial Sequence
  source: /note="Description of Artificial Sequence: Synthetic oligonucleotide"
uugcucuacuuuuguauagu

SEQ ID NO: 1755 - RNA, 20 nt, Artificial Sequence
  source: /note="Description of Artificial Sequence: Synthetic oligonucleotide"
ugaagacauuggucaugggu

SEQ ID NO: 1756 - RNA, 20 nt, Artificial Sequence
  source: /note="Description of Artificial Sequence: Synthetic oligonucleotide"
cagcugaagacauuggucau

SEQ ID NO: 1757 - RNA, 20 nt, Artificial Sequence
  source: /note="Description of Artificial Sequence: Synthetic oligonucleotide"
ucucugacagcugaagacau

SEQ ID NO: 1758 - RNA, 20 nt, Artificial Sequence
  source: /note="Description of Artificial Sequence: Synthetic oligonucleotide"
gugcuucacacaauucagac

SEQ ID NO: 1759 - RNA, 20 nt, Artificial Sequence
  source: /note="Description of Artificial Sequence: Synthetic oligonucleotide"
aguuaacugaucuuauggcc

SEQ ID NO: 1760 - RNA, 20 nt, Artificial Sequence
  source: /note="Description of Artificial Sequence: Synthetic oligonucleotide"
gauuucuuuagguguaauag

SEQ ID NO: 1761 - RNA, 20 nt, Artificial Sequence
  source: /note="Description of Artificial Sequence: Synthetic oligonucleotide"
acuaagaauugccaauucuu

SEQ ID NO: 1762 - RNA, 20 nt, Artificial Sequence
  source: /note="Description of Artificial Sequence: Synthetic oligonucleotide"
cggggcaaaugccuaagaau

SEQ ID NO: 1763 - RNA, 20 nt, Artificial Sequence
  source: /note="Description of Artificial Sequence: Synthetic oligonucleotide"
ggagagaugaauagggcuug

SEQ ID NO: 1764 - RNA, 20 nt, Artificial Sequence
  source: /note="Description of Artificial Sequence: Synthetic oligonucleotide"
agaauuugggagagaugaau

SEQ ID NO: 1765 - RNA, 20 nt, Artificial Sequence
  source: /note="Description of Artificial Sequence: Synthetic oligonucleotide"
cuucuaauuaggggagaauu

SEQ ID NO: 1766 - RNA, 20 nt, Artificial Sequence
  source: /note="Description of Artificial Sequence: Synthetic oligonucleotide"
uccccuaauuagaagucuca

SEQ ID NO: 1767 - RNA, 20 nt, Artificial Sequence
  source: /note="Description of Artificial Sequence: Synthetic oligonucleotide"
acgggcucuuaagagaauga

SEQ ID NO: 1768 - RNA, 20 nt, Artificial Sequence
  source: /note="Description of Artificial Sequence: Synthetic oligonucleotide"
gcaggugcugccuauaacaa

SEQ ID NO: 1769 - RNA, 20 nt, Artificial Sequence
  source: /note="Description of Artificial Sequence: Synthetic oligonucleotide"
uccaugcuucauugagaagc

SEQ ID NO: 1770 - RNA, 20 nt, Artificial Sequence
  source: /note="Description of Artificial Sequence: Synthetic oligonucleotide"
accugcuucucaaugaagca

SEQ ID NO: 1771 - RNA, 20 nt, Artificial Sequence
  source: /note="Description of Artificial Sequence: Synthetic oligonucleotide"
ugaagcauggauuccacccc

SEQ ID NO: 1772 - RNA, 20 nt, Artificial Sequence
  source: /note="Description of Artificial Sequence: Synthetic oligonucleotide"
ugggauugggagguugccag

SEQ ID NO: 1773 - RNA, 20 nt, Artificial Sequence
  source: /note="Description of Artificial Sequence: Synthetic oligonucleotide"
gugggauugggagguugcca

SEQ ID NO: 1774 - RNA, 20 nt, Artificial Sequence
  source: /note="Description of Artificial Sequence: Synthetic oligonucleotide"
gcucucacugugggauuggg

SEQ ID NO: 1775 - RNA, 20 nt, Artificial Sequence
  source: /note="Description of Artificial Sequence: Synthetic oligonucleotide"
gaugcucucacugugggauu

SEQ ID NO: 1776 - RNA, 20 nt, Artificial Sequence
  source: /note="Description of Artificial Sequence: Synthetic oligonucleotide"
uaggaagaugcucucacugu

SEQ ID NO: 1777 - RNA, 20 nt, Artificial Sequence
  source: /note="Description of Artificial Sequence: Synthetic oligonucleotide"
cacagugagagcaucuuccu

SEQ ID NO: 1778 - RNA, 20 nt, Artificial Sequence
  source: /note="Description of Artificial Sequence: Synthetic oligonucleotide"
auggccuccgugacaugagg

SEQ ID NO: 1779 - RNA, 20 nt, Artificial Sequence
  source: /note="Description of Artificial Sequence: Synthetic oligonucleotide"
cccauggccuccgugacaug

SEQ ID NO: 1780 - RNA, 20 nt, Artificial Sequence
  source: /note="Description of Artificial Sequence: Synthetic oligonucleotide"
ugucacggaggccauggguc

SEQ ID NO: 1781 - RNA, 20 nt, Artificial Sequence
  source: /note="Description of Artificial Sequence: Synthetic oligonucleotide"
uuauccgccucccagaccca

SEQ ID NO: 1782 - RNA, 20 nt, Artificial Sequence
  source: /note="Description of Artificial Sequence: Synthetic oligonucleotide"
gucacggaggccaugggucu

SEQ ID NO: 1783 - RNA, 20 nt, Artificial Sequence
  source: /note="Description of Artificial Sequence: Synthetic oligonucleotide"
ugggucugggaggcggauaa

SEQ ID NO: 1784 - RNA, 20 nt, Artificial Sequence
  source: /note="Description of Artificial Sequence: Synthetic oligonucleotide"
ucugggaggcggauaaagga

SEQ ID NO: 1785 - RNA, 20 nt, Artificial Sequence
  source: /note="Description of Artificial Sequence: Synthetic oligonucleotide"
cugggaggcggauaaaggaa

SEQ ID NO: 1786 - RNA, 20 nt, Artificial Sequence
  source: /note="Description of Artificial Sequence: Synthetic oligonucleotide"
ugggaggcggauaaaggaag

SEQ ID NO: 1787 - RNA, 20 nt, Artificial Sequence
  source: /note="Description of Artificial Sequence: Synthetic oligonucleotide"
gcggauaaaggaaggggguc

SEQ ID NO: 1788 - RNA, 20 nt, Artificial Sequence
  source: /note="Description of Artificial Sequence: Synthetic oligonucleotide"
aagggggucagguguggaga

SEQ ID NO: 1789 - RNA, 20 nt, Artificial Sequence
  source: /note="Description of Artificial Sequence: Synthetic oligonucleotide"
gggucagguguggagauggu

SEQ ID NO: 1790 - RNA, 20 nt, Artificial Sequence
  source: /note="Description of Artificial Sequence: Synthetic oligonucleotide"
ggauacuguguaugaaugau

SEQ ID NO: 1791 - RNA, 20 nt, Artificial Sequence
  source: /note="Description of Artificial Sequence: Synthetic oligonucleotide"
gauacuguguaugaaugauu

SEQ ID NO: 1792 - RNA, 20 nt, Artificial Sequence
  source: /note="Description of Artificial Sequence: Synthetic oligonucleotide"
uaaaugagucauucaaauca

SEQ ID NO: 1793 - RNA, 20 nt, Artificial Sequence
  source: /note="Description of Artificial Sequence: Synthetic oligonucleotide"
aaaugagucauucaaaucau

SEQ ID NO: 1794 - RNA, 20 nt, Artificial Sequence
  source: /note="Description of Artificial Sequence: Synthetic oligonucleotide"
ucauucaaaucaugggugag

SEQ ID NO: 1795 - RNA, 20 nt, Artificial Sequence
  source: /note="Description of Artificial Sequence: Synthetic oligonucleotide"
ucaaaucaugggugagugga

SEQ ID NO: 1796 - RNA, 20 nt, Artificial Sequence
  source: /note="Description of Artificial Sequence: Synthetic oligonucleotide"
gguagaguggguggagcaaa

SEQ ID NO: 1797 - RNA, 20 nt, Artificial Sequence
  source: /note="Description of Artificial Sequence: Synthetic oligonucleotide"
ggagcaaacggcagacggau

SEQ ID NO: 1798 - RNA, 20 nt, Artificial Sequence
  source: /note="Description of Artificial Sequence: Synthetic oligonucleotide"
cauuugcuggauguuugacc

SEQ ID NO: 1799 - RNA, 20 nt, Artificial Sequence
  source: /note="Description of Artificial Sequence: Synthetic oligonucleotide"
uacccagcuacucaccuacc

SEQ ID NO: 1800 - RNA, 20 nt, Artificial Sequence
  source: /note="Description of Artificial Sequence: Synthetic oligonucleotide"
gaccugguaggugaguagcu

SEQ ID NO: 1801 - RNA, 20 nt, Artificial Sequence
  source: /note="Description of Artificial Sequence: Synthetic oligonucleotide"
uaggugaguagcuggguagu

SEQ ID NO: 1802 - RNA, 20 nt, Artificial Sequence
  source: /note="Description of Artificial Sequence: Synthetic oligonucleotide"
agcuggguaguugguuaacc

SEQ ID NO: 1803 - RNA, 20 nt, Artificial Sequence
  source: /note="Description of Artificial Sequence: Synthetic oligonucleotide"
uggguaugucugccuagaaa

SEQ ID NO: 1804 - RNA, 20 nt, Artificial Sequence
  source: /note="Description of Artificial Sequence: Synthetic oligonucleotide"
uucuccacugcccaguucuc

SEQ ID NO: 1805 - RNA, 20 nt, Artificial Sequence
  source: /note="Description of Artificial Sequence: Synthetic oligonucleotide"
cggaaagaugugugugggga

SEQ ID NO: 1806 - RNA, 20 nt, Artificial Sequence
  source: /note="Description of Artificial Sequence: Synthetic oligonucleotide"
agauguguguggggaugguu

SEQ ID NO: 1807 - RNA, 20 nt, Artificial Sequence
  source: /note="Description of Artificial Sequence: Synthetic oligonucleotide"
gggaugguuggguacuugcu

SEQ ID NO: 1808 - RNA, 20 nt, Artificial Sequence
  source: /note="Description of Artificial Sequence: Synthetic oligonucleotide"
guggguagaugggaagugaa

SEQ ID NO: 1809 - RNA, 20 nt, Artificial Sequence
  source: /note="Description of Artificial Sequence: Synthetic oligonucleotide"
guagaugggaagugaauggg

SEQ ID NO: 1810 - RNA, 20 nt, Artificial Sequence
  source: /note="Description of Artificial Sequence: Synthetic oligonucleotide"
ggguggguugaguggguguu

SEQ ID NO: 1811 - RNA, 20 nt, Artificial Sequence
  source: /note="Description of Artificial Sequence: Synthetic oligonucleotide"
gguggguugaguggguguuu

SEQ ID NO: 1812 - RNA, 20 nt, Artificial Sequence
  source: /note="Description of Artificial Sequence: Synthetic oligonucleotide"
uguuugggugaauuaauagg

SEQ ID NO: 1813 - RNA, 20 nt, Artificial Sequence
  source: /note="Description of Artificial Sequence: Synthetic oligonucleotide"
uuaauaggugguuggagggg

SEQ ID NO: 1814 - RNA, 20 nt, Artificial Sequence
  source: /note="Description of Artificial Sequence: Synthetic oligonucleotide"
aggaaguggaugagauagcu

SEQ ID NO: 1815 - RNA, 20 nt, Artificial Sequence
  source: /note="Description of Artificial Sequence: Synthetic oligonucleotide"
aaguggaugagauagcuagg

SEQ ID NO: 1816 - RNA, 20 nt, Artificial Sequence
  source: /note="Description of Artificial Sequence: Synthetic oligonucleotide"
aggccaugaugugugucuga

SEQ ID NO: 1817 - RNA, 20 nt, Artificial Sequence
  source: /note="Description of Artificial Sequence: Synthetic oligonucleotide"
ugugucugaugggguagucc

SEQ ID NO: 1818 - RNA, 20 nt, Artificial Sequence
  source: /note="Description of Artificial Sequence: Synthetic oligonucleotide"
aguccuggaagcugugaucc

SEQ ID NO: 1819 - RNA, 20 nt, Artificial Sequence
  source: /note="Description of Artificial Sequence: Synthetic oligonucleotide"
gaagcugugauccugggaac

SEQ ID NO: 1820 - RNA, 20 nt, Artificial Sequence
  source: /note="Description of Artificial Sequence: Synthetic oligonucleotide"
aagcugugauccugggaacu

SEQ ID NO: 1821 - RNA, 20 nt, Artificial Sequence
  source: /note="Description of Artificial Sequence: Synthetic oligonucleotide"
uccugggaacuggguggaga

SEQ ID NO: 1822 - RNA, 20 nt, Artificial Sequence
  source: /note="Description of Artificial Sequence: Synthetic oligonucleotide"
gacuuaggacugaagaccua

SEQ ID NO: 1823 - RNA, 20 nt, Artificial Sequence
  source: /note="Description of Artificial Sequence: Synthetic oligonucleotide"
ggaggugcugaaguccagug

SEQ ID NO: 1824 - RNA, 20 nt, Artificial Sequence
  source: /note="Description of Artificial Sequence: Synthetic oligonucleotide"
gaaguccaguguggaugauu

SEQ ID NO: 1825 - RNA, 20 nt, Artificial Sequence
  source: /note="Description of Artificial Sequence: Synthetic oligonucleotide"
uccaguguggaugauuggga

SEQ ID NO: 1826 - RNA, 20 nt, Artificial Sequence
  source: /note="Description of Artificial Sequence: Synthetic oligonucleotide"
aguguggaugauugggaagg

SEQ ID NO: 1827 - RNA, 20 nt, Artificial Sequence
  source: /note="Description of Artificial Sequence: Synthetic oligonucleotide"
ugugguuggaagguagcuga

SEQ ID NO: 1828 - RNA, 20 nt, Artificial Sequence
  source: /note="Description of Artificial Sequence: Synthetic oligonucleotide"
gugguuggaagguagcugau

SEQ ID NO: 1829 - RNA, 20 nt, Artificial Sequence
  source: /note="Description of Artificial Sequence: Synthetic oligonucleotide"
ugguuggaagguagcugaug

SEQ ID NO: 1830 - RNA, 20 nt, Artificial Sequence
  source: /note="Description of Artificial Sequence: Synthetic oligonucleotide"
gaagguagcugauggggggc

SEQ ID NO: 1831 - RNA, 20 nt, Artificial Sequence
  source: /note="Description of Artificial Sequence: Synthetic oligonucleotide"
gucauugaugggucauugau

SEQ ID NO: 1832 - RNA, 20 nt, Artificial Sequence
  source: /note="Description of Artificial Sequence: Synthetic oligonucleotide"
aaagcacuaaaagagugggg

SEQ ID NO: 1833 - RNA, 20 nt, Artificial Sequence
  source: /note="Description of Artificial Sequence: Synthetic oligonucleotide"
cuaaaagcacuaaaagagug

SEQ ID NO: 1834 - RNA, 20 nt, Artificial Sequence
  source: /note="Description of Artificial Sequence: Synthetic oligonucleotide"
gugggacgauaaggagccau

SEQ ID NO: 1835 - RNA, 20 nt, Artificial Sequence
  source: /note="Description of Artificial Sequence: Synthetic oligonucleotide"
gcccgcacggccugagucca

SEQ ID NO: 1836 - RNA, 20 nt, Artificial Sequence
  source: /note="Description of Artificial Sequence: Synthetic oligonucleotide"
ggcccgcacggccugagucc

SEQ ID NO: 1837 - RNA, 20 nt, Artificial Sequence
  source: /note="Description of Artificial Sequence: Synthetic oligonucleotide"
ucccuggacucaggccgugc

SEQ ID NO: 1838 - RNA, 20 nt, Artificial Sequence
  source: /note="Description of Artificial Sequence: Synthetic oligonucleotide"
ccaagcgggucacccuuaaa

SEQ ID NO: 1839 - RNA, 20 nt, Artificial Sequence
  source: /note="Description of Artificial Sequence: Synthetic oligonucleotide"
gccaagcgggucacccuuaa

SEQ ID NO: 1840 - RNA, 20 nt, Artificial Sequence
  source: /note="Description of Artificial Sequence: Synthetic oligonucleotide"
cauguugggaguggccaagc

SEQ ID NO: 1841 - RNA, 20 nt, Artificial Sequence
  source: /note="Description of Artificial Sequence: Synthetic oligonucleotide"
ccgcuuggccacucccaaca

SEQ ID NO: 1842 - RNA, 20 nt, Artificial Sequence
  source: /note="Description of Artificial Sequence: Synthetic oligonucleotide"
gccccggggggggcggccag

SEQ ID NO: 1843 - RNA, 20 nt, Artificial Sequence
  source: /note="Description of Artificial Sequence: Synthetic oligonucleotide"
ccucgccgccccgggggggg

SEQ ID NO: 1844 - RNA, 20 nt, Artificial Sequence
  source: /note="Description of Artificial Sequence: Synthetic oligonucleotide"
ccccgccgcgccgccaugau

SEQ ID NO: 1845 - RNA, 20 nt, Artificial Sequence
  source: /note="Description of Artificial Sequence: Synthetic oligonucleotide"
gccccgccgcgccgccauga

SEQ ID NO: 1846 - RNA, 20 nt, Artificial Sequence
  source: /note="Description of Artificial Sequence: Synthetic oligonucleotide"
accuccccaucauggcggcg

SEQ ID NO: 1847 - RNA, 20 nt, Artificial Sequence
  source: /note="Description of Artificial Sequence: Synthetic oligonucleotide"
cugaggucacggcggcgcgc

SEQ ID NO: 1848 - RNA, 20 nt, Artificial Sequence
  source: /note="Description of Artificial Sequence: Synthetic oligonucleotide"
gggcucggagcuccccuccu

SEQ ID NO: 1849 - RNA, 20 nt, Artificial Sequence
  source: /note="Description of Artificial Sequence: Synthetic oligonucleotide"
gccggccaggugccggggcu

SEQ ID NO: 1850 - RNA, 20 nt, Artificial Sequence
  source: /note="Description of Artificial Sequence: Synthetic oligonucleotide"
gcgccgccggccaggugccg

SEQ ID NO: 1851 - RNA, 20 nt, Artificial Sequence
  source: /note="Description of Artificial Sequence: Synthetic oligonucleotide"
ggcgccgccggccaggugcc

SEQ ID NO: 1852 - RNA, 20 nt, Artificial Sequence
  source: /note="Description of Artificial Sequence: Synthetic oligonucleotide"
gccgggccucaccggggagg

SEQ ID NO: 1853 - RNA, 20 nt, Artificial Sequence
  source: /note="Description of Artificial Sequence: Synthetic oligonucleotide"
cgggccgggccucaccgggg

SEQ ID NO: 1854 - RNA, 20 nt, Artificial Sequence
  source: /note="Description of Artificial Sequence: Synthetic oligonucleotide"
cacccgcgggcuccccaggc

SEQ ID NO: 1855 - RNA, 20 nt, Artificial Sequence
  source: /note="Description of Artificial Sequence: Synthetic oligonucleotide"
ccuaccucggcgcgucccgc

SEQ ID NO: 1856 - RNA, 20 nt, Artificial Sequence
  source: /note="Description of Artificial Sequence: Synthetic oligonucleotide"
ucuccugccccggggugcac

SEQ ID NO: 1857 - RNA, 20 nt, Artificial Sequence
  source: /note="Description of Artificial Sequence: Synthetic oligonucleotide"
uccucggggguccagggucc

SEQ ID NO: 1858 - RNA, 20 nt, Artificial Sequence
  source: /note="Description of Artificial Sequence: Synthetic oligonucleotide"
gacccuggacccccgaggag

SEQ ID NO: 1859 - RNA, 20 nt, Artificial Sequence
  source: /note="Description of Artificial Sequence: Synthetic oligonucleotide"
gccgcgcgggcccacuccuc

SEQ ID NO: 1860 - RNA, 20 nt, Artificial Sequence
  source: /note="Description of Artificial Sequence: Synthetic oligonucleotide"
cgccgcgcgggcccacuccu

SEQ ID NO: 1861 - RNA, 20 nt, Artificial Sequence
  source: /note="Description of Artificial Sequence: Synthetic oligonucleotide"
gaggugggggcugcgccgcg

SEQ ID NO: 1862 - RNA, 20 nt, Artificial Sequence
  source: /note="Description of Artificial Sequence: Synthetic oligonucleotide"
ccccccaggggucgcagagg

SEQ ID NO: 1863 - RNA, 20 nt, Artificial Sequence
  source: /note="Description of Artificial Sequence: Synthetic oligonucleotide"
gcccccaccucugcgacccc

SEQ ID NO: 1864 - RNA, 20 nt, Artificial Sequence
  source: /note="Description of Artificial Sequence: Synthetic oligonucleotide"
cccccaccucugcgaccccu

SEQ ID NO: 1865 - RNA, 20 nt, Artificial Sequence
  source: /note="Description of Artificial Sequence: Synthetic oligonucleotide"
cccaccucugcgaccccugg

SEQ ID NO: 1866 - RNA, 20 nt, Artificial Sequence
  source: /note="Description of Artificial Sequence: Synthetic oligonucleotide"
uccuacccggacgcccccca

SEQ ID NO: 1867 - RNA, 20 nt, Artificial Sequence
  source: /note="Description of Artificial Sequence: Synthetic oligonucleotide"
acuuuggcagcguggggagg

SEQ ID NO: 1868 - RNA, 20 nt, Artificial Sequence
  source: /note="Description of Artificial Sequence: Synthetic oligonucleotide"
cacuuuggcagcguggggag

SEQ ID NO: 1869 - RNA, 20 nt, Artificial Sequence
  source: /note="Description of Artificial Sequence: Synthetic oligonucleotide"
gcaggugcuuccuccgggcc

SEQ ID NO: 1870 - RNA, 20 nt, Artificial Sequence
  source: /note="Description of Artificial Sequence: Synthetic oligonucleotide"
ugcuuccuccgggccugggu

SEQ ID NO: 1871 - RNA, 20 nt, Artificial Sequence
  source: /note="Description of Artificial Sequence: Synthetic oligonucleotide"
gcuuccuccgggccugggua

SEQ ID NO: 1872 - RNA, 20 nt, Artificial Sequence
  source: /note="Description of Artificial Sequence: Synthetic oligonucleotide"
ccuccgugggcuggcagucu

SEQ ID NO: 1873 - RNA, 20 nt, Artificial Sequence
  source: /note="Description of Artificial Sequence: Synthetic oligonucleotide"
cagggggcuccuccgugggc

SEQ ID NO: 1874 - RNA, 20 nt, Artificial Sequence
  source: /note="Description of Artificial Sequence: Synthetic oligonucleotide"
uucccagggggcuccuccgu

SEQ ID NO: 1875 - RNA, 20 nt, Artificial Sequence
  source: /note="Description of Artificial Sequence: Synthetic oligonucleotide"
agcccacggaggagcccccu

SEQ ID NO: 1876 - RNA, 20 nt, Artificial Sequence
  source: /note="Description of Artificial Sequence: Synthetic oligonucleotide"
gguugcaggcgcugcccucg

SEQ ID NO: 1877 - RNA, 20 nt, Artificial Sequence
  source: /note="Description of Artificial Sequence: Synthetic oligonucleotide"
gcagcgccugcaaccaggcc

SEQ ID NO: 1878 - RNA, 20 nt, Artificial Sequence
  source: /note="Description of Artificial Sequence: Synthetic oligonucleotide"
gggcccaggcaaccggggcg

SEQ ID NO: 1879 - RNA, 20 nt, Artificial Sequence
  source: /note="Description of Artificial Sequence: Synthetic oligonucleotide"
ggaggccgggcccaggcaac

SEQ ID NO: 1880 - RNA, 20 nt, Artificial Sequence
  source: /note="Description of Artificial Sequence: Synthetic oligonucleotide"
cgcccuccccagggagaugg

SEQ ID NO: 1881 - RNA, 20 nt, Artificial Sequence
  source: /note="Description of Artificial Sequence: Synthetic oligonucleotide"
aggacaacccccgcucccca

SEQ ID NO: 1882 - RNA, 20 nt, Artificial Sequence
  source: /note="Description of Artificial Sequence: Synthetic oligonucleotide"
gguccagaaaugaggacccu

SEQ ID NO: 1883 - RNA, 20 nt, Artificial Sequence
  source: /note="Description of Artificial Sequence: Synthetic oligonucleotide"
ugguccagaaaugaggaccc

SEQ ID NO: 1884 - RNA, 20 nt, Artificial Sequence
  source: /note="Description of Artificial Sequence: Synthetic oligonucleotide"
aaagaaaacgauagggcucc

SEQ ID NO: 1885 - RNA, 20 nt, Artificial Sequence
  source: /note="Description of Artificial Sequence: Synthetic oligonucleotide"
gacuagagcaaucuugguug

SEQ ID NO: 1886 - RNA, 20 nt, Artificial Sequence
  source: /note="Description of Artificial Sequence: Synthetic oligonucleotide"
acuagagcaaucuugguugg

SEQ ID NO: 1887 - RNA, 20 nt, Artificial Sequence
  source: /note="Description of Artificial Sequence: Synthetic oligonucleotide"
agcaaucuugguuggggggu

SEQ ID NO: 1888 - RNA, 20 nt, Artificial Sequence
  source: /note="Description of Artificial Sequence: Synthetic oligonucleotide"
gcaaucuugguuggggggug

SEQ ID NO: 1889 - RNA, 20 nt, Artificial Sequence
  source: /note="Description of Artificial Sequence: Synthetic oligonucleotide"
caaucuugguuggggggugg

SEQ ID NO: 1890 - RNA, 20 nt, Artificial Sequence
  source: /note="Description of Artificial Sequence: Synthetic oligonucleotide"
cccucaugcauacccagcuu

SEQ ID NO: 1891 - RNA, 20 nt, Artificial Sequence
  source: /note="Description of Artificial Sequence: Synthetic oligonucleotide"
ucccucaugcauacccagcu

SEQ ID NO: 1892 - RNA, 20 nt, Artificial Sequence
  source: /note="Description of Artificial Sequence: Synthetic oligonucleotide"
gcccaagcuggguaugcaug

SEQ ID NO: 1893 - RNA, 20 nt, Artificial Sequence
  source: /note="Description of Artificial Sequence: Synthetic oligonucleotide"
cccaagcuggguaugcauga

SEQ ID NO: 1894 - RNA, 20 nt, Artificial Sequence
  source: /note="Description of Artificial Sequence: Synthetic oligonucleotide"
aauguuggggagaagcgaaa

SEQ ID NO: 1895 - RNA, 20 nt, Artificial Sequence
  source: /note="Description of Artificial Sequence: Synthetic oligonucleotide"
agaagcgaaaggguuaaugc

SEQ ID NO: 1896 - RNA, 20 nt, Artificial Sequence
  source: /note="Description of Artificial Sequence: Synthetic oligonucleotide"
agaacccuaagguccugugu

SEQ ID NO: 1897 - RNA, 20 nt, Artificial Sequence
  source: /note="Description of Artificial Sequence: Synthetic oligonucleotide"
gaacccuaagguccugugug

SEQ ID NO: 1898 - RNA, 20 nt, Artificial Sequence
  source: /note="Description of Artificial Sequence: Synthetic oligonucleotide"
aacccuaagguccugugugg

SEQ ID NO: 1899 - RNA, 20 nt, Artificial Sequence
  source: /note="Description of Artificial Sequence: Synthetic oligonucleotide"
cuccaacccuucccccacac

SEQ ID NO: 1900 - RNA, 20 nt, Artificial Sequence
  source: /note="Description of Artificial Sequence: Synthetic oligonucleotide"
aacccaauggagaaaaguaa

SEQ ID NO: 1901 - RNA, 20 nt, Artificial Sequence
  source: /note="Description of Artificial Sequence: Synthetic oligonucleotide"
acccaauggagaaaaguaaa

SEQ ID NO: 1902 - RNA, 20 nt, Artificial Sequence
  source: /note="Description of Artificial Sequence: Synthetic oligonucleotide"
cccaauggagaaaaguaaag

SEQ ID NO: 1903 - RNA, 20 nt, Artificial Sequence
  source: /note="Description of Artificial Sequence: Synthetic oligonucleotide"
cucugauccuauacaccguc

SEQ ID NO: 1904 - RNA, 20 nt, Artificial Sequence
  source: /note="Description of Artificial Sequence: Synthetic oligonucleotide"
gugugcauggaugugagggc

SEQ ID NO: 1905 - RNA, 20 nt, Artificial Sequence
  source: /note="Description of Artificial Sequence: Synthetic oligonucleotide"
uggagaaaugguaagauuga

SEQ ID NO: 1906 - RNA, 20 nt, Artificial Sequence
  source: /note="Description of Artificial Sequence: Synthetic oligonucleotide"
gcaggaucuguauaaagggg

SEQ ID NO: 1907 - RNA, 20 nt, Artificial Sequence
  source: /note="Description of Artificial Sequence: Synthetic oligonucleotide"
uaaaggggaggaguuauuga

SEQ ID NO: 1908 - RNA, 20 nt, Artificial Sequence
  source: /note="Description of Artificial Sequence: Synthetic oligonucleotide"
aaaggggaggaguuauugau

SEQ ID NO: 1909 - RNA, 20 nt, Artificial Sequence
  source: /note="Description of Artificial Sequence: Synthetic oligonucleotide"
aaggggaggaguuauugaug

SEQ ID NO: 1910 - RNA, 20 nt, Artificial Sequence
  source: /note="Description of Artificial Sequence: Synthetic oligonucleotide"
aggaguuauugauggggaga

SEQ ID NO: 1911 - RNA, 20 nt, Artificial Sequence
  source: /note="Description of Artificial Sequence: Synthetic oligonucleotide"
gggagacggaggcaugcuga

SEQ ID NO: 1912 - RNA, 20 nt, Artificial Sequence
  source: /note="Description of Artificial Sequence: Synthetic oligonucleotide"
gacggaggcaugcugagggu

SEQ ID NO: 1913 - RNA, 20 nt, Artificial Sequence
  source: /note="Description of Artificial Sequence: Synthetic oligonucleotide"
cggaggcaugcugaggguag

SEQ ID NO: 1914 - RNA, 20 nt, Artificial Sequence
  source: /note="Description of Artificial Sequence: Synthetic oligonucleotide"
ccacacaccuucuaucccaa

SEQ ID NO: 1915 - RNA, 20 nt, Artificial Sequence
  source: /note="Description of Artificial Sequence: Synthetic oligonucleotide"
ggauagaagguguguggaaa

SEQ ID NO: 1916 - RNA, 20 nt, Artificial Sequence
  source: /note="Description of Artificial Sequence: Synthetic oligonucleotide"
ucccagcccaggggagcuaa

SEQ ID NO: 1917 - RNA, 20 nt, Artificial Sequence
  source: /note="Description of Artificial Sequence: Synthetic oligonucleotide"
ugaacaccauuagcuccccu

SEQ ID NO: 1918 - RNA, 20 nt, Artificial Sequence
  source: /note="Description of Artificial Sequence: Synthetic oligonucleotide"
caccauuagcuccccugggc

SEQ ID NO: 1919 - RNA, 20 nt, Artificial Sequence
  source: /note="Description of Artificial Sequence: Synthetic oligonucleotide"
accauuagcuccccugggcu

SEQ ID NO: 1920 - RNA, 20 nt, Artificial Sequence
  source: /note="Description of Artificial Sequence: Synthetic oligonucleotide"
cucaguuuaccucccagccc

SEQ ID NO: 1921 - RNA, 20 nt, Artificial Sequence
  source: /note="Description of Artificial Sequence: Synthetic oligonucleotide"
auuagcuccccugggcuggg

SEQ ID NO: 1922 - RNA, 20 nt, Artificial Sequence
  source: /note="Description of Artificial Sequence: Synthetic oligonucleotide"
cugggcugggagguaaacug

SEQ ID NO: 1923 - RNA, 20 nt, Artificial Sequence
  source: /note="Description of Artificial Sequence: Synthetic oligonucleotide"
ggacugagguuuugagggau

SEQ ID NO: 1924 - RNA, 20 nt, Artificial Sequence
  source: /note="Description of Artificial Sequence: Synthetic oligonucleotide"
agcggggcauugugggccug

SEQ ID NO: 1925 - RNA, 20 nt, Artificial Sequence
  source: /note="Description of Artificial Sequence: Synthetic oligonucleotide"
accggcucagcggggcauug

SEQ ID NO: 1926 - RNA, 20 nt, Artificial Sequence
  source: /note="Description of Artificial Sequence: Synthetic oligonucleotide"
cagcugcugcaccggcucag

SEQ ID NO: 1927 - RNA, 20 nt, Artificial Sequence
  source: /note="Description of Artificial Sequence: Synthetic oligonucleotide"
cccacaaugccccgcugagc

SEQ ID NO: 1928 - RNA, 20 nt, Artificial Sequence
  source: /note="Description of Artificial Sequence: Synthetic oligonucleotide"
aagcagagaaaauccgaugg

SEQ ID NO: 1929 - RNA, 20 nt, Artificial Sequence
  source: /note="Description of Artificial Sequence: Synthetic oligonucleotide"
gcagagaaaauccgauggag

SEQ ID NO: 1930 - RNA, 20 nt, Artificial Sequence
  source: /note="Description of Artificial Sequence: Synthetic oligonucleotide"
ggcagucucucugggccuug

SEQ ID NO: 1931 - RNA, 20 nt, Artificial Sequence
  source: /note="Description of Artificial Sequence: Synthetic oligonucleotide"
caggcagucucucugggccu

SEQ ID NO: 1932 - RNA, 20 nt, Artificial Sequence
  source: /note="Description of Artificial Sequence: Synthetic oligonucleotide"
acugccuggcccggcgccaa

SEQ ID NO: 1933 - RNA, 20 nt, Artificial Sequence
  source: /note="Description of Artificial Sequence: Synthetic oligonucleotide"
ccaagggagaacaucgaggg

SEQ ID NO: 1934 - RNA, 20 nt, Artificial Sequence
  source: /note="Description of Artificial Sequence: Synthetic oligonucleotide"
accuucccccucagcagcuu

SEQ ID NO: 1935 - RNA, 20 nt, Artificial Sequence
  source: /note="Description of Artificial Sequence: Synthetic oligonucleotide"
gguggggccgaagcugcuga

SEQ ID NO: 1936 - RNA, 20 nt, Artificial Sequence
  source: /note="Description of Artificial Sequence: Synthetic oligonucleotide"
guggggccgaagcugcugag

SEQ ID NO: 1937 - RNA, 20 nt, Artificial Sequence
  source: /note="Description of Artificial Sequence: Synthetic oligonucleotide"
caggcagguaacggguggac

SEQ ID NO: 1938 - RNA, 20 nt, Artificial Sequence
  source: /note="Description of Artificial Sequence: Synthetic oligonucleotide"
ggugacaggcagguaacggg

SEQ ID NO: 1939 - RNA, 20 nt, Artificial Sequence
  source: /note="Description of Artificial Sequence: Synthetic oligonucleotide"
ccuuggugacaggcagguaa

SEQ ID NO: 1940 - RNA, 20 nt, Artificial Sequence
  source: /note="Description of Artificial Sequence: Synthetic oligonucleotide"
cgggggcccuccuuggugac

SEQ ID NO: 1941 - RNA, 20 nt, Artificial Sequence
  source: /note="Description of Artificial Sequence: Synthetic oligonucleotide"
ccguuaccugccugucacca

SEQ ID NO: 1942 - RNA, 20 nt, Artificial Sequence
  source: /note="Description of Artificial Sequence: Synthetic oligonucleotide"
ucugccauccagaaugucuc

SEQ ID NO: 1943 - RNA, 20 nt, Artificial Sequence
  source: /note="Description of Artificial Sequence: Synthetic oligonucleotide"
uggcaucucugguaagagaa

SEQ ID NO: 1944 - RNA, 20 nt, Artificial Sequence
  source: /note="Description of Artificial Sequence: Synthetic oligonucleotide"
augggcuggaugcucccugg

SEQ ID NO: 1945 - RNA, 20 nt, Artificial Sequence
  source: /note="Description of Artificial Sequence: Synthetic oligonucleotide"
agcucagccgcugcugcgcu

SEQ ID NO: 1946 - RNA, 20 nt, Artificial Sequence
  source: /note="Description of Artificial Sequence: Synthetic oligonucleotide"
cagcucagccgcugcugcgc

SEQ ID NO: 1947 - RNA, 20 nt, Artificial Sequence
  source: /note="Description of Artificial Sequence: Synthetic oligonucleotide"
caagucacccagcgcagcag

SEQ ID NO: 1948 - RNA, 20 nt, Artificial Sequence
  source: /note="Description of Artificial Sequence: Synthetic oligonucleotide"
gaaaaggcucuggacccaag

SEQ ID NO: 1949 - RNA, 20 nt, Artificial Sequence
  source: /note="Description of Artificial Sequence: Synthetic oligonucleotide"
uggucuggucacuggcuccc

SEQ ID NO: 1950 - RNA, 20 nt, Artificial Sequence
  source: /note="Description of Artificial Sequence: Synthetic oligonucleotide"
gggagccuuggucuggucac

SEQ ID NO: 1951 - RNA, 20 nt, Artificial Sequence
  source: /note="Description of Artificial Sequence: Synthetic oligonucleotide"
agcauacuaauuggguccag

SEQ ID NO: 1952 - RNA, 20 nt, Artificial Sequence
  source: /note="Description of Artificial Sequence: Synthetic oligonucleotide"
gggaauaccuguggaauaag

SEQ ID NO: 1953 - RNA, 20 nt, Artificial Sequence
  source: /note="Description of Artificial Sequence: Synthetic oligonucleotide"
ugggauagacugaugggagu

SEQ ID NO: 1954 - RNA, 20 nt, Artificial Sequence
  source: /note="Description of Artificial Sequence: Synthetic oligonucleotide"
gggagcugggauagacugau

SEQ ID NO: 1955 - RNA, 20 nt, Artificial Sequence
  source: /note="Description of Artificial Sequence: Synthetic oligonucleotide"
cagucuaucccagcucccuc

SEQ ID NO: 1956 - RNA, 20 nt, Artificial Sequence
  source: /note="Description of Artificial Sequence: Synthetic oligonucleotide"
ggauacacccagacagccag

SEQ ID NO: 1957 - RNA, 20 nt, Artificial Sequence
  source: /note="Description of Artificial Sequence: Synthetic oligonucleotide"
ccagcucccucuggcugucu

SEQ ID NO: 1958 - RNA, 20 nt, Artificial Sequence
  source: /note="Description of Artificial Sequence: Synthetic oligonucleotide"
uuggcccgugguucaggaac

SEQ ID NO: 1959 - RNA, 20 nt, Artificial Sequence
  source: /note="Description of Artificial Sequence: Synthetic oligonucleotide"
acagaagcuguuuuggcccg

SEQ ID NO: 1960 - RNA, 20 nt, Artificial Sequence
  source: /note="Description of Artificial Sequence: Synthetic oligonucleotide"
agccacuacagaagcuguuu

SEQ ID NO: 1961 - RNA, 20 nt, Artificial Sequence
  source: /note="Description of Artificial Sequence: Synthetic oligonucleotide"
aacagcuucuguaguggcua

SEQ ID NO: 1962 - RNA, 20 nt, Artificial Sequence
  source: /note="Description of Artificial Sequence: Synthetic oligonucleotide"
guaguggcuagggagaggcu

SEQ ID NO: 1963 - RNA, 20 nt, Artificial Sequence
  source: /note="Description of Artificial Sequence: Synthetic oligonucleotide"
cagcgaugcuggcuaccccu

SEQ ID NO: 1964 - RNA, 20 nt, Artificial Sequence
  source: /note="Description of Artificial Sequence: Synthetic oligonucleotide"
uuuuugcuggguaaaccaag

SEQ ID NO: 1965 - RNA, 20 nt, Artificial Sequence
  source: /note="Description of Artificial Sequence: Synthetic oligonucleotide"
ccuugguuuacccagcaaaa

SEQ ID NO: 1966 - RNA, 20 nt, Artificial Sequence
  source: /note="Description of Artificial Sequence: Synthetic oligonucleotide"
ugaaugaauaacacgucugg

SEQ ID NO: 1967 - RNA, 20 nt, Artificial Sequence
  source: /note="Description of Artificial Sequence: Synthetic oligonucleotide"
gagggucucccaggucuccc

SEQ ID NO: 1968 - RNA, 20 nt, Artificial Sequence
  source: /note="Description of Artificial Sequence: Synthetic oligonucleotide"
ucuaucagggagggucuccc

SEQ ID NO: 1969 - RNA, 20 nt, Artificial Sequence
  source: /note="Description of Artificial Sequence: Synthetic oligonucleotide"
caaaugccacucuaucaggg

SEQ ID NO: 1970 - RNA, 20 nt, Artificial Sequence
  source: /note="Description of Artificial Sequence: Synthetic oligonucleotide"
auucaaaugccacucuauca

SEQ ID NO: 1971 - RNA, 20 nt, Artificial Sequence
  source: /note="Description of Artificial Sequence: Synthetic oligonucleotide"
gucaggcuccuccccaccac

SEQ ID NO: 1972 - RNA, 20 nt, Artificial Sequence
  source: /note="Description of Artificial Sequence: Synthetic oligonucleotide"
ccagccuccuaccagguccu

SEQ ID NO: 1973 - RNA, 20 nt, Artificial Sequence
  source: /note="Description of Artificial Sequence: Synthetic oligonucleotide"
cacggaggaagcccuugaug

SEQ ID NO: 1974 - RNA, 20 nt, Artificial Sequence
  source: /note="Description of Artificial Sequence: Synthetic oligonucleotide"
aucuugcaaaagccuuggca

SEQ ID NO: 1975 - RNA, 20 nt, Artificial Sequence
  source: /note="Description of Artificial Sequence: Synthetic oligonucleotide"
ggcuauuccacaggguucuu

SEQ ID NO: 1976 - RNA, 20 nt, Artificial Sequence
  source: /note="Description of Artificial Sequence: Synthetic oligonucleotide"
acacgggauaauaauaauga

SEQ ID NO: 1977 - RNA, 20 nt, Artificial Sequence
  source: /note="Description of Artificial Sequence: Synthetic oligonucleotide"
gcaacuuaugucaccgcuca

SEQ ID NO: 1978 - RNA, 20 nt, Artificial Sequence
  source: /note="Description of Artificial Sequence: Synthetic oligonucleotide"
ggcaacuuaugucaccgcuc

SEQ ID NO: 1979 - RNA, 20 nt, Artificial Sequence
  source: /note="Description of Artificial Sequence: Synthetic oligonucleotide"
acucccuggcuaggugacgu

SEQ ID NO: 1980 - RNA, 20 nt, Artificial Sequence
  source: /note="Description of Artificial Sequence: Synthetic oligonucleotide"
agccauguuacucccuggcu

SEQ ID NO: 1981 - RNA, 20 nt, Artificial Sequence
  source: /note="Description of Artificial Sequence: Synthetic oligonucleotide"
ugucaagccauguuacuccc

SEQ ID NO: 1982 - RNA, 20 nt, Artificial Sequence
  source: /note="Description of Artificial Sequence: Synthetic oligonucleotide"
ggaucugugaggaugcagca

SEQ ID NO: 1983 - RNA, 20 nt, Artificial Sequence
  source: /note="Description of Artificial Sequence: Synthetic oligonucleotide"
aggaucugugaggaugcagc

SEQ ID NO: 1984 - RNA, 20 nt, Artificial Sequence
  source: /note="Description of Artificial Sequence: Synthetic oligonucleotide"
ggggucuaugagagcgagga

SEQ ID NO: 1985 - RNA, 20 nt, Artificial Sequence
  source: /note="Description of Artificial Sequence: Synthetic oligonucleotide"
cuccccagccucagauggug

SEQ ID NO: 1986 - RNA, 20 nt, Artificial Sequence
  source: /note="Description of Artificial Sequence: Synthetic oligonucleotide"
ucacuuccugcaggaacucc

SEQ ID NO: 1987 - RNA, 20 nt, Artificial Sequence
  source: /note="Description of Artificial Sequence: Synthetic oligonucleotide"
ugcuugcuucccccuugguc

SEQ ID NO: 1988 - RNA, 20 nt, Artificial Sequence
  source: /note="Description of Artificial Sequence: Synthetic oligonucleotide"
ugguggcaucugcagguguc

SEQ ID NO: 1989 - RNA, 20 nt, Artificial Sequence
  source: /note="Description of Artificial Sequence: Synthetic oligonucleotide"
caucugcaggugucaggcag

SEQ ID NO: 1990 - RNA, 20 nt, Artificial Sequence
  source: /note="Description of Artificial Sequence: Synthetic oligonucleotide"
ugucaggcagugggguggca

SEQ ID NO: 1991 - RNA, 20 nt, Artificial Sequence
  source: /note="Description of Artificial Sequence: Synthetic oligonucleotide"
gguguacccucugcccucag

SEQ ID NO: 1992 - RNA, 20 nt, Artificial Sequence
  source: /note="Description of Artificial Sequence: Synthetic oligonucleotide"
ggguguacccucugcccuca

SEQ ID NO: 1993 - RNA, 20 nt, Artificial Sequence
  source: /note="Description of Artificial Sequence: Synthetic oligonucleotide"
uggguguacccucugcccuc

SEQ ID NO: 1994 - RNA, 20 nt, Artificial Sequence
  source: /note="Description of Artificial Sequence: Synthetic oligonucleotide"
agugcugauacucuggaguu

SEQ ID NO: 1995 - RNA, 20 nt, Artificial Sequence
  source: /note="Description of Artificial Sequence: Synthetic oligonucleotide"
uuauuaauggcuuagaggag

SEQ ID NO: 1996 - RNA, 20 nt, Artificial Sequence
  source: /note="Description of Artificial Sequence: Synthetic oligonucleotide"
aguuauuaauggcuuagagg

SEQ ID NO: 1997 - RNA, 20 nt, Artificial Sequence
  source: /note="Description of Artificial Sequence: Synthetic oligonucleotide"
guuauuaacucaguuauuaa

SEQ ID NO: 1998 - RNA, 20 nt, Artificial Sequence
  source: /note="Description of Artificial Sequence: Synthetic oligonucleotide"
cccuggccggcugugcgacc

SEQ ID NO: 1999 - RNA, 20 nt, Artificial Sequence
  source: /note="Description of Artificial Sequence: Synthetic oligonucleotide"
ccucucugggucugguuccg

SEQ ID NO: 2000 - RNA, 20 nt, Artificial Sequence
  source: /note="Description of Artificial Sequence: Synthetic oligonucleotide"
ccagaccuggggcaucugcg

SEQ ID NO: 2001 - RNA, 20 nt, Artificial Sequence
  source: /note="Description of Artificial Sequence: Synthetic oligonucleotide"
ccucgcagaugccccagguc

SEQ ID NO: 2002 - RNA, 20 nt, Artificial Sequence
  source: /note="Description of Artificial Sequence: Synthetic oligonucleotide"
cucgcagaugccccaggucu

SEQ ID NO: 2003 - RNA, 20 nt, Artificial Sequence
  source: /note="Description of Artificial Sequence: Synthetic oligonucleotide"
aggugcauccucacucccac

SEQ ID NO: 2004 - RNA, 20 nt, Artificial Sequence
  source: /note="Description of Artificial Sequence: Synthetic oligonucleotide"
ggugcauccucacucccacu

SEQ ID NO: 2005 - RNA, 20 nt, Artificial Sequence
  source: /note="Description of Artificial Sequence: Synthetic oligonucleotide"
gugcauccucacucccacug

SEQ ID NO: 2006 - RNA, 20 nt, Artificial Sequence
  source: /note="Description of Artificial Sequence: Synthetic oligonucleotide"
cucccacuggggaaucaccc

SEQ ID NO: 2007 - RNA, 20 nt, Artificial Sequence
  source: /note="Description of Artificial Sequence: Synthetic oligonucleotide"
ucccacuggggaaucaccca

SEQ ID NO: 2008 - RNA, 20 nt, Artificial Sequence
  source: /note="Description of Artificial Sequence: Synthetic oligonucleotide"
agaugcacguaugagacccu

SEQ ID NO: 2009 - RNA, 20 nt, Artificial Sequence
  source: /note="Description of Artificial Sequence: Synthetic oligonucleotide"
gaaaccuucaagggugggcc

SEQ ID NO: 2010 - RNA, 20 nt, Artificial Sequence
  source: /note="Description of Artificial Sequence: Synthetic oligonucleotide"
cugagggaaaccuucaaggg

SEQ ID NO: 2011 - RNA, 20 nt, Artificial Sequence
  source: /note="Description of Artificial Sequence: Synthetic oligonucleotide"
gaauggcuugacuuggagug

SEQ ID NO: 2012 - RNA, 20 nt, Artificial Sequence
  source: /note="Description of Artificial Sequence: Synthetic oligonucleotide"
cuugacuuggagugagguca

SEQ ID NO: 2013 - RNA, 20 nt, Artificial Sequence
  source: /note="Description of Artificial Sequence: Synthetic oligonucleotide"
ugaauguuggaagaaugccu

SEQ ID NO: 2014 - RNA, 20 nt, Artificial Sequence
  source: /note="Description of Artificial Sequence: Synthetic oligonucleotide"
guuggaagaaugccuggguu

SEQ ID NO: 2015 - RNA, 20 nt, Artificial Sequence
  source: /note="Description of Artificial Sequence: Synthetic oligonucleotide"
uuggaagaaugccuggguuu

SEQ ID NO: 2016 - RNA, 20 nt, Artificial Sequence
  source: /note="Description of Artificial Sequence: Synthetic oligonucleotide"
gggagaucaagcgggcagag

SEQ ID NO: 2017 - RNA, 20 nt, Artificial Sequence
  source: /note="Description of Artificial Sequence: Synthetic oligonucleotide"
cccgcuugaucucccccucc

SEQ ID NO: 2018 - RNA, 20 nt, Artificial Sequence
  source: /note="Description of Artificial Sequence: Synthetic oligonucleotide"
uagggcaggugcccgugucc

SEQ ID NO: 2019 - RNA, 20 nt, Artificial Sequence
  source: /note="Description of Artificial Sequence: Synthetic oligonucleotide"
gucuugugaugccuauaaau

SEQ ID NO: 2020 - RNA, 20 nt, Artificial Sequence
  source: /note="Description of Artificial Sequence: Synthetic oligonucleotide"
guggggauaaaggaaggccc

SEQ ID NO: 2021 - RNA, 20 nt, Artificial Sequence
  source: /note="Description of Artificial Sequence: Synthetic oligonucleotide"
agagccccccaagagcacac

SEQ ID NO: 2022 - RNA, 20 nt, Artificial Sequence
  source: /note="Description of Artificial Sequence: Synthetic oligonucleotide"
gcccaggcagggaaguuugg

SEQ ID NO: 2023 - RNA, 20 nt, Artificial Sequence
  source: /note="Description of Artificial Sequence: Synthetic oligonucleotide"
aaacuucccugccugggcag

SEQ ID NO: 2024 - RNA, 20 nt, Artificial Sequence
  source: /note="Description of Artificial Sequence: Synthetic oligonucleotide"
ucuggguaaacagccguaac

SEQ ID NO: 2025 - RNA, 20 nt, Artificial Sequence
  source: /note="Description of Artificial Sequence: Synthetic oligonucleotide"
cccugagucuuuucugaacc

SEQ ID NO: 2026 - RNA, 20 nt, Artificial Sequence
  source: /note="Description of Artificial Sequence: Synthetic oligonucleotide"
cagaaaagacucaggggcug

SEQ ID NO: 2027 - RNA, 20 nt, Artificial Sequence
  source: /note="Description of Artificial Sequence: Synthetic oligonucleotide"
cuggcauuguguuggggaca

SEQ ID NO: 2028 - RNA, 20 nt, Artificial Sequence
  source: /note="Description of Artificial Sequence: Synthetic oligonucleotide"
augauaugucauuugucccu

SEQ ID NO: 2029 - RNA, 20 nt, Artificial Sequence
  source: /note="Description of Artificial Sequence: Synthetic oligonucleotide"
ugaccggaccugaggcucug

SEQ ID NO: 2030 - RNA, 20 nt, Artificial Sequence
  source: /note="Description of Artificial Sequence: Synthetic oligonucleotide"
ugaaccagcccugauccccc

SEQ ID NO: 2031 - RNA, 20 nt, Artificial Sequence
  source: /note="Description of Artificial Sequence: Synthetic oligonucleotide"
ccagagaaguggcgguggag

SEQ ID NO: 2032 - RNA, 20 nt, Artificial Sequence
  source: /note="Description of Artificial Sequence: Synthetic oligonucleotide"
auccagagaaguggcggugg

SEQ ID NO: 2033 - RNA, 20 nt, Artificial Sequence
  source: /note="Description of Artificial Sequence: Synthetic oligonucleotide"
uccauccagagaaguggcgg

SEQ ID NO: 2034 - RNA, 20 nt, Artificial Sequence
  source: /note="Description of Artificial Sequence: Synthetic oligonucleotide"
ugcuccauccagagaagugg

SEQ ID NO: 2035 - RNA, 20 nt, Artificial Sequence
  source: /note="Description of Artificial Sequence: Synthetic oligonucleotide"
uccaccgccacuucucugga

SEQ ID NO: 2036 - RNA, 20 nt, Artificial Sequence
  source: /note="Description of Artificial Sequence: Synthetic oligonucleotide"
agcauuuacuacaaucuugc

SEQ ID NO: 2037 - RNA, 20 nt, Artificial Sequence
  source: /note="Description of Artificial Sequence: Synthetic oligonucleotide"
aucuugcuggcacccauugc

SEQ ID NO: 2038 - RNA, 20 nt, Artificial Sequence
  source: /note="Description of Artificial Sequence: Synthetic oligonucleotide"
cagucucgcagggccagcaa

SEQ ID NO: 2039 - RNA, 20 nt, Artificial Sequence
  source: /note="Description of Artificial Sequence: Synthetic oligonucleotide"
uaccccaggggugcccugaa

SEQ ID NO: 2040 - RNA, 20 nt, Artificial Sequence
  source: /note="Description of Artificial Sequence: Synthetic oligonucleotide"
auaccccaggggugcccuga

SEQ ID NO: 2041 - RNA, 20 nt, Artificial Sequence
  source: /note="Description of Artificial Sequence: Synthetic oligonucleotide"
uccaagccugggguucaacu

SEQ ID NO: 2042 - RNA, 20 nt, Artificial Sequence
  source: /note="Description of Artificial Sequence: Synthetic oligonucleotide"
cuuggaguucaggcugcuua

SEQ ID NO: 2043 - RNA, 20 nt, Artificial Sequence
  source: /note="Description of Artificial Sequence: Synthetic oligonucleotide"
uuugcaaaugcugauggcaa

SEQ ID NO: 2044 - RNA, 20 nt, Artificial Sequence
  source: /note="Description of Artificial Sequence: Synthetic oligonucleotide"
agagaguuugcaaaugcuga

SEQ ID NO: 2045 - RNA, 20 nt, Artificial Sequence
  source: /note="Description of Artificial Sequence: Synthetic oligonucleotide"
ucagcauuugcaaacucucu

SEQ ID NO: 2046 - RNA, 20 nt, Artificial Sequence
  source: /note="Description of Artificial Sequence: Synthetic oligonucleotide"
ccagauggcaggagccaaca

SEQ ID NO: 2047 - RNA, 20 nt, Artificial Sequence
  source: /note="Description of Artificial Sequence: Synthetic oligonucleotide"
aggagccaacaagggccccu

SEQ ID NO: 2048 - RNA, 20 nt, Artificial Sequence
  source: /note="Description of Artificial Sequence: Synthetic oligonucleotide"
cuuaggcaguggccaugcca

SEQ ID NO: 2049 - RNA, 20 nt, Artificial Sequence
  source: /note="Description of Artificial Sequence: Synthetic oligonucleotide"
aggucgcagcccuuaggcag

SEQ ID NO: 2050 - RNA, 20 nt, Artificial Sequence
  source: /note="Description of Artificial Sequence: Synthetic oligonucleotide"
uuggcauggccacugccuaa

SEQ ID NO: 2051 - RNA, 20 nt, Artificial Sequence
  source: /note="Description of Artificial Sequence: Synthetic oligonucleotide"
ggggauccaggagucccuac

SEQ ID NO: 2052 - RNA, 20 nt, Artificial Sequence
  source: /note="Description of Artificial Sequence: Synthetic oligonucleotide"
uggggauccaggagucccua

SEQ ID NO: 2053 - RNA, 20 nt, Artificial Sequence
  source: /note="Description of Artificial Sequence: Synthetic oligonucleotide"
agaggccuccacaguugaug

SEQ ID NO: 2054 - RNA, 20 nt, Artificial Sequence
  source: /note="Description of Artificial Sequence: Synthetic oligonucleotide"
ccaucaacuguggaggccuc

SEQ ID NO: 2055 - RNA, 20 nt, Artificial Sequence
  source: /note="Description of Artificial Sequence: Synthetic oligonucleotide"
caucaacuguggaggccucu

SEQ ID NO: 2056 - RNA, 20 nt, Artificial Sequence
  source: /note="Description of Artificial Sequence: Synthetic oligonucleotide"
guccaagacaccuugggggu

SEQ ID NO: 2057 - RNA, 20 nt, Artificial Sequence
  source: /note="Description of Artificial Sequence: Synthetic oligonucleotide"
gcccuguguccaagacaccu

SEQ ID NO: 2058 - RNA, 20 nt, Artificial Sequence
  source: /note="Description of Artificial Sequence: Synthetic oligonucleotide"
uuuaguggcagugacuuugg

SEQ ID NO: 2059 - RNA, 20 nt, Artificial Sequence
  source: /note="Description of Artificial Sequence: Synthetic oligonucleotide"
ccccaagcucccaagauucc

SEQ ID NO: 2060 - RNA, 20 nt, Artificial Sequence
  source: /note="Description of Artificial Sequence: Synthetic oligonucleotide"
cgcccggaaucuugggagcu

SEQ ID NO: 2061 - RNA, 20 nt, Artificial Sequence
  source: /note="Description of Artificial Sequence: Synthetic oligonucleotide"
ucccgggcauccugcuuuug

SEQ ID NO: 2062 - RNA, 20 nt, Artificial Sequence
  source: /note="Description of Artificial Sequence: Synthetic oligonucleotide"
ggugugggucugaggguccc

SEQ ID NO: 2063 - RNA, 20 nt, Artificial Sequence
  source: /note="Description of Artificial Sequence: Synthetic oligonucleotide"
gaccuagaggugugggucug

SEQ ID NO: 2064 - RNA, 20 nt, Artificial Sequence
  source: /note="Description of Artificial Sequence: Synthetic oligonucleotide"
agggcagguuauaugugaac

SEQ ID NO: 2065 - RNA, 20 nt, Artificial Sequence
  source: /note="Description of Artificial Sequence: Synthetic oligonucleotide"
gauuugacuuuuuucaggag

SEQ ID NO: 2066 - RNA, 20 nt, Artificial Sequence
  source: /note="Description of Artificial Sequence: Synthetic oligonucleotide"
cuggcccagccaagaaacag

SEQ ID NO: 2067 - RNA, 20 nt, Artificial Sequence
  source: /note="Description of Artificial Sequence: Synthetic oligonucleotide"
gccuggcccagccaagaaac

SEQ ID NO: 2068 - RNA, 20 nt, Artificial Sequence
  source: /note="Description of Artificial Sequence: Synthetic oligonucleotide"
ucucuagagccccuguuucu

SEQ ID NO: 2069 - RNA, 20 nt, Artificial Sequence
  source: /note="Description of Artificial Sequence: Synthetic oligonucleotide"
uagagccccuguuucuuggc

SEQ ID NO: 2070 - RNA, 20 nt, Artificial Sequence
  source: /note="Description of Artificial Sequence: Synthetic oligonucleotide"
agagccccuguuucuuggcu

SEQ ID NO: 2071 - RNA, 20 nt, Artificial Sequence
  source: /note="Description of Artificial Sequence: Synthetic oligonucleotide"
cccuguuucuuggcugggcc

SEQ ID NO: 2072 - RNA, 20 nt, Artificial Sequence
  source: /note="Description of Artificial Sequence: Synthetic oligonucleotide"
uuggagagggcguucagagu

SEQ ID NO: 2073 - RNA, 20 nt, Artificial Sequence
  source: /note="Description of Artificial Sequence: Synthetic oligonucleotide"
ugguuuuaggaugggggugu

SEQ ID NO: 2074 - RNA, 20 nt, Artificial Sequence
  source: /note="Description of Artificial Sequence: Synthetic oligonucleotide"
caagggcugguuuuaggaug

SEQ ID NO: 2075 - RNA, 20 nt, Artificial Sequence
  source: /note="Description of Artificial Sequence: Synthetic oligonucleotide"
aaccaccaggauacacugau

SEQ ID NO: 2076 - RNA, 20 nt, Artificial Sequence
  source: /note="Description of Artificial Sequence: Synthetic oligonucleotide"
ugcugcccaucaguguaucc

SEQ ID NO: 2077 - RNA, 20 nt, Artificial Sequence
  source: /note="Description of Artificial Sequence: Synthetic oligonucleotide"
uaccaaaguguccccuggag

SEQ ID NO: 2078 - RNA, 20 nt, Artificial Sequence
  source: /note="Description of Artificial Sequence: Synthetic oligonucleotide"
auuaccaaaguguccccugg

SEQ ID NO: 2079 - RNA, 20 nt, Artificial Sequence
  source: /note="Description of Artificial Sequence: Synthetic oligonucleotide"
ggguguugaccagaaaggug

SEQ ID NO: 2080 - RNA, 20 nt, Artificial Sequence
  source: /note="Description of Artificial Sequence: Synthetic oligonucleotide"
agccagugaccacaccuuuc

SEQ ID NO: 2081 - RNA, 20 nt, Artificial Sequence
  source: /note="Description of Artificial Sequence: Synthetic oligonucleotide"
ggauaaaaguggagguaggg

SEQ ID NO: 2082 - RNA, 20 nt, Artificial Sequence
  source: /note="Description of Artificial Sequence: Synthetic oligonucleotide"
ugagagucaagggauaaaag

SEQ ID NO: 2083 - RNA, 20 nt, Artificial Sequence
  source: /note="Description of Artificial Sequence: Synthetic oligonucleotide"
agcugacugcugagagucaa

SEQ ID NO: 2084 - RNA, 20 nt, Artificial Sequence
  source: /note="Description of Artificial Sequence: Synthetic oligonucleotide"
gagcugacugcugagaguca

SEQ ID NO: 2085 - RNA, 20 nt, Artificial Sequence
  source: /note="Description of Artificial Sequence: Synthetic oligonucleotide"
cagucagcucucaauuucuc

SEQ ID NO: 2086 - RNA, 20 nt, Artificial Sequence
  source: /note="Description of Artificial Sequence: Synthetic oligonucleotide"
cagaaaaagggauagggcug

SEQ ID NO: 2087 - RNA, 20 nt, Artificial Sequence
  source: /note="Description of Artificial Sequence: Synthetic oligonucleotide"
uccagaaaaagggauagggc

SEQ ID NO: 2088 - RNA, 20 nt, Artificial Sequence
  source: /note="Description of Artificial Sequence: Synthetic oligonucleotide"
augguccagaaaaagggaua

SEQ ID NO: 2089 - RNA, 20 nt, Artificial Sequence
  source: /note="Description of Artificial Sequence: Synthetic oligonucleotide"
uugaggaugguccagaaaaa

SEQ ID NO: 2090 - RNA, 20 nt, Artificial Sequence
  source: /note="Description of Artificial Sequence: Synthetic oligonucleotide"
uuugaggaugguccagaaaa

SEQ ID NO: 2091 - RNA, 20 nt, Artificial Sequence
  source: /note="Description of Artificial Sequence: Synthetic oligonucleotide"
ucuggaccauccucaaauug

SEQ ID NO: 2092 - RNA, 20 nt, Artificial Sequence
  source: /note="Description of Artificial Sequence: Synthetic oligonucleotide"
gcaucugucgggcucuggac

SEQ ID NO: 2093 - RNA, 20 nt, Artificial Sequence
  source: /note="Description of Artificial Sequence: Synthetic oligonucleotide"
ggccaagguuaacacacugg

SEQ ID NO: 2094 - RNA, 20 nt, Artificial Sequence
  source: /note="Description of Artificial Sequence: Synthetic oligonucleotide"
cgggccaagguuaacacacu

SEQ ID NO: 2095 - RNA, 20 nt, Artificial Sequence
  source: /note="Description of Artificial Sequence: Synthetic oligonucleotide"
ccgggccaagguuaacacac

SEQ ID NO: 2096 - RNA, 20 nt, Artificial Sequence
  source: /note="Description of Artificial Sequence: Synthetic oligonucleotide"
gaugcaggccaggauuccug

SEQ ID NO: 2097 - RNA, 20 nt, Artificial Sequence
  source: /note="Description of Artificial Sequence: Synthetic oligonucleotide"
ccuguggucgcuccaggcau

SEQ ID NO: 2098 - RNA, 20 nt, Artificial Sequence
  source: /note="Description of Artificial Sequence: Synthetic oligonucleotide"
acaggcggauaauagagagu

SEQ ID NO: 2099 - RNA, 20 nt, Artificial Sequence
  source: /note="Description of Artificial Sequence: Synthetic oligonucleotide"
agaguuggcuccaucugugu

SEQ ID NO: 2100 - RNA, 20 nt, Artificial Sequence
  source: /note="Description of Artificial Sequence: Synthetic oligonucleotide"
guuggcuccaucuguguugg

SEQ ID NO: 2101 - RNA, 20 nt, Artificial Sequence
  source: /note="Description of Artificial Sequence: Synthetic oligonucleotide"
uuggcuccaucuguguuggu

SEQ ID NO: 2102 - RNA, 20 nt, Artificial Sequence
  source: /note="Description of Artificial Sequence: Synthetic oligonucleotide"
ccugaaauccaauccccucc

SEQ ID NO: 2103 - RNA, 20 nt, Artificial Sequence
  source: /note="Description of Artificial Sequence: Synthetic oligonucleotide"
gggauuggauuucaggacau

SEQ ID NO: 2104 - RNA, 20 nt, Artificial Sequence
  source: /note="Description of Artificial Sequence: Synthetic oligonucleotide"
uggauuucaggacauaggcc

SEQ ID NO: 2105 - RNA, 20 nt, Artificial Sequence
  source: /note="Description of Artificial Sequence: Synthetic oligonucleotide"
cagcauucuagcaccuggca

SEQ ID NO: 2106 - RNA, 20 nt, Artificial Sequence
  source: /note="Description of Artificial Sequence: Synthetic oligonucleotide"
aaaucaccuggcucuuucuu

SEQ ID NO: 2107 - RNA, 20 nt, Artificial Sequence
  source: /note="Description of Artificial Sequence: Synthetic oligonucleotide"
gaaaucaccuggcucuuucu

SEQ ID NO: 2108 - RNA, 20 nt, Artificial Sequence
  source: /note="Description of Artificial Sequence: Synthetic oligonucleotide"
ccuaacucuuuugggccuca

SEQ ID NO: 2109 - RNA, 20 nt, Artificial Sequence
  source: /note="Description of Artificial Sequence: Synthetic oligonucleotide"
accuaacucuuuugggccuc

SEQ ID NO: 2110 - RNA, 20 nt, Artificial Sequence
  source: /note="Description of Artificial Sequence: Synthetic oligonucleotide"
cuaugaggucagaccucugc

SEQ ID NO: 2111 - RNA, 20 nt, Artificial Sequence
  source: /note="Description of Artificial Sequence: Synthetic oligonucleotide"
cacccugguaaaaacucacc

SEQ ID NO: 2112 - RNA, 20 nt, Artificial Sequence
  source: /note="Description of Artificial Sequence: Synthetic oligonucleotide"
uggcucuccugggggacccc

SEQ ID NO: 2113 - RNA, 20 nt, Artificial Sequence
  source: /note="Description of Artificial Sequence: Synthetic oligonucleotide"
aguccccuuggcucuccugg

SEQ ID NO: 2114 - RNA, 20 nt, Artificial Sequence
  source: /note="Description of Artificial Sequence: Synthetic oligonucleotide"
aagaguccccuuggcucucc

SEQ ID NO: 2115 - RNA, 20 nt, Artificial Sequence
  source: /note="Description of Artificial Sequence: Synthetic oligonucleotide"
uuucuuuggaagaguccccu

SEQ ID NO: 2116 - RNA, 20 nt, Artificial Sequence
  source: /note="Description of Artificial Sequence: Synthetic oligonucleotide"
uuccaaagaaaccccuuuca

SEQ ID NO: 2117 - RNA, 20 nt, Artificial Sequence
  source: /note="Description of Artificial Sequence: Synthetic oligonucleotide"
ugugguccugagcccugaaa

SEQ ID NO: 2118 - RNA, 20 nt, Artificial Sequence
  source: /note="Description of Artificial Sequence: Synthetic oligonucleotide"
agaaaccccuuucagggcuc

SEQ ID NO: 2119 - RNA, 20 nt, Artificial Sequence
  source: /note="Description of Artificial Sequence: Synthetic oligonucleotide"
cagaggccacgggccucuca

SEQ ID NO: 2120 - RNA, 20 nt, Artificial Sequence
  source: /note="Description of Artificial Sequence: Synthetic oligonucleotide"
ucccaguuccucucccugag

SEQ ID NO: 2121 - RNA, 20 nt, Artificial Sequence
  source: /note="Description of Artificial Sequence: Synthetic oligonucleotide"
gccacgggccucucagggag

SEQ ID NO: 2122 - RNA, 20 nt, Artificial Sequence
  source: /note="Description of Artificial Sequence: Synthetic oligonucleotide"
gccucucagggagaggaacu

SEQ ID NO: 2123 - RNA, 20 nt, Artificial Sequence
  source: /note="Description of Artificial Sequence: Synthetic oligonucleotide"
gccuuucugaggcaccuggc

SEQ ID NO: 2124 - RNA, 20 nt, Artificial Sequence
  source: /note="Description of Artificial Sequence: Synthetic oligonucleotide"
ccuuucugaggcaccuggca

SEQ ID NO: 2125 - RNA, 20 nt, Artificial Sequence
  source: /note="Description of Artificial Sequence: Synthetic oligonucleotide"
gguguggagggccccggcca

SEQ ID NO: 2126 - RNA, 20 nt, Artificial Sequence
  source: /note="Description of Artificial Sequence: Synthetic oligonucleotide"
aggggagacccugaggggcu

SEQ ID NO: 2127 - RNA, 20 nt, Artificial Sequence
  source: /note="Description of Artificial Sequence: Synthetic oligonucleotide"
gcugcccgucugcaacagag

SEQ ID NO: 2128 - RNA, 20 nt, Artificial Sequence
  source: /note="Description of Artificial Sequence: Synthetic oligonucleotide"
ucuccccucucuguugcaga

SEQ ID NO: 2129 - RNA, 20 nt, Artificial Sequence
  source: /note="Description of Artificial Sequence: Synthetic oligonucleotide"
cuccccucucuguugcagac

SEQ ID NO: 2130 - RNA, 20 nt, Artificial Sequence
  source: /note="Description of Artificial Sequence: Synthetic oligonucleotide"
ggcuucgcugaggccgggau

SEQ ID NO: 2131 - RNA, 20 nt, Artificial Sequence
  source: /note="Description of Artificial Sequence: Synthetic oligonucleotide"
gggcuucgcugaggccggga

SEQ ID NO: 2132 - RNA, 20 nt, Artificial Sequence
  source: /note="Description of Artificial Sequence: Synthetic oligonucleotide"
ggcggaggugacacggggga

SEQ ID NO: 2133 - RNA, 20 nt, Artificial Sequence
  source: /note="Description of Artificial Sequence: Synthetic oligonucleotide"
gauggguggcggaggugaca

SEQ ID NO: 2134 - RNA, 20 nt, Artificial Sequence
  source: /note="Description of Artificial Sequence: Synthetic oligonucleotide"
cucaccagcugcugauccga

SEQ ID NO: 2135 - RNA, 20 nt, Artificial Sequence
  source: /note="Description of Artificial Sequence: Synthetic oligonucleotide"
gcagcuggugagugccaugc

SEQ ID NO: 2136 - RNA, 20 nt, Artificial Sequence
  source: /note="Description of Artificial Sequence: Synthetic oligonucleotide"
ggggcaagcaggacaugccc

SEQ ID NO: 2137 - RNA, 20 nt, Artificial Sequence
  source: /note="Description of Artificial Sequence: Synthetic oligonucleotide"
caggggcuuaucugaggccu

SEQ ID NO: 2138 - RNA, 20 nt, Artificial Sequence
  source: /note="Description of Artificial Sequence: Synthetic oligonucleotide"
aggccucagauaagccccug

SEQ ID NO: 2139 - RNA, 20 nt, Artificial Sequence
  source: /note="Description of Artificial Sequence: Synthetic oligonucleotide"
guccccuucucauuccccag

SEQ ID NO: 2140 - RNA, 20 nt, Artificial Sequence
  source: /note="Description of Artificial Sequence: Synthetic oligonucleotide"
agccccuggggaaugagaag

SEQ ID NO: 2141 - RNA, 20 nt, Artificial Sequence
  source: /note="Description of Artificial Sequence: Synthetic oligonucleotide"
aggaggagucagcucccggc

SEQ ID NO: 2142 - RNA, 20 nt, Artificial Sequence
  source: /note="Description of Artificial Sequence: Synthetic oligonucleotide"
acgcccaggggcuugccugc

SEQ ID NO: 2143 - RNA, 20 nt, Artificial Sequence
  source: /note="Description of Artificial Sequence: Synthetic oligonucleotide"
gcaagccccugggcgugugc

SEQ ID NO: 2144 - RNA, 20 nt, Artificial Sequence
  source: /note="Description of Artificial Sequence: Synthetic oligonucleotide"
caagccccugggcgugugcu

SEQ ID NO: 2145 - RNA, 20 nt, Artificial Sequence
  source: /note="Description of Artificial Sequence: Synthetic oligonucleotide"
ccugggcgugugcugggguu

SEQ ID NO: 2146 - RNA, 20 nt, Artificial Sequence
  source: /note="Description of Artificial Sequence: Synthetic oligonucleotide"
caaugccccuuggauccuca

SEQ ID NO: 2147 - RNA, 20 nt, Artificial Sequence
  source: /note="Description of Artificial Sequence: Synthetic oligonucleotide"
ugcucucacccaaugccccu

SEQ ID NO: 2148 - RNA, 20 nt, Artificial Sequence
  source: /note="Description of Artificial Sequence: Synthetic oligonucleotide"
aagccauuuaauaaagagua

SEQ ID NO: 2149 - RNA, 20 nt, Artificial Sequence
  source: /note="Description of Artificial Sequence: Synthetic oligonucleotide"
cuacucuuuauuaaauggcu

SEQ ID NO: 2150 - RNA, 20 nt, Artificial Sequence
  source: /note="Description of Artificial Sequence: Synthetic oligonucleotide"
aaacuuacuaugaccuggcc

SEQ ID NO: 2151 - RNA, 20 nt, Artificial Sequence
  source: /note="Description of Artificial Sequence: Synthetic oligonucleotide"
ggcuguggcaaggauucagu

SEQ ID NO: 2152 - RNA, 20 nt, Artificial Sequence
  source: /note="Description of Artificial Sequence: Synthetic oligonucleotide"
gauguuggguggagaccaua

SEQ ID NO: 2153 - RNA, 20 nt, Artificial Sequence
  source: /note="Description of Artificial Sequence: Synthetic oligonucleotide"
ucaagauccugccuccauca

SEQ ID NO: 2154 - RNA, 20 nt, Artificial Sequence
  source: /note="Description of Artificial Sequence: Synthetic oligonucleotide"
ugauuggcauccccugaugg

SEQ ID NO: 2155 - RNA, 20 nt, Artificial Sequence
  source: /note="Description of Artificial Sequence: Synthetic oligonucleotide"
ggcaggaucuugaaaaggaa

SEQ ID NO: 2156 - RNA, 20 nt, Artificial Sequence
  source: /note="Description of Artificial Sequence: Synthetic oligonucleotide"
ucauaauaagaacccacacu

SEQ ID NO: 2157 - RNA, 20 nt, Artificial Sequence
  source: /note="Description of Artificial Sequence: Synthetic oligonucleotide"
gcuuuguuucaccucaugcc

SEQ ID NO: 2158 - RNA, 20 nt, Artificial Sequence
  source: /note="Description of Artificial Sequence: Synthetic oligonucleotide"
caucuucacccuacacccug

SEQ ID NO: 2159 - RNA, 20 nt, Artificial Sequence
  source: /note="Description of Artificial Sequence: Synthetic oligonucleotide"
aucuucacccuacacccugc

SEQ ID NO: 2160 - RNA, 20 nt, Artificial Sequence
  source: /note="Description of Artificial Sequence: Synthetic oligonucleotide"
gcggggucauugaaagguug

SEQ ID NO: 2161 - RNA, 20 nt, Artificial Sequence
  source: /note="Description of Artificial Sequence: Synthetic oligonucleotide"
agauguuguauaaggacaaa

SEQ ID NO: 2162 - RNA, 20 nt, Artificial Sequence
  source: /note="Description of Artificial Sequence: Synthetic oligonucleotide"
uuuuccaauccugaaauugg

SEQ ID NO: 2163 - RNA, 20 nt, Artificial Sequence
  source: /note="Description of Artificial Sequence: Synthetic oligonucleotide"
aguuuuccaauccugaaauu

SEQ ID NO: 2164 - RNA, 20 nt, Artificial Sequence
  source: /note="Description of Artificial Sequence: Synthetic oligonucleotide"
ggaggcaagguaaccacucu

SEQ ID NO: 2165 - RNA, 20 nt, Artificial Sequence
  source: /note="Description of Artificial Sequence: Synthetic oligonucleotide"
gggaggcaagguaaccacuc

SEQ ID NO: 2166 - RNA, 20 nt, Artificial Sequence
  source: /note="Description of Artificial Sequence: Synthetic oligonucleotide"
accuucuugggcagaggggu

SEQ ID NO: 2167 - RNA, 20 nt, Artificial Sequence
  source: /note="Description of Artificial Sequence: Synthetic oligonucleotide"
auccugaccuucuugggcag

SEQ ID NO: 2168 - RNA, 20 nt, Artificial Sequence
  source: /note="Description of Artificial Sequence: Synthetic oligonucleotide"
ccagugauccugaccuucuu

SEQ ID NO: 2169 - RNA, 20 nt, Artificial Sequence
  source: /note="Description of Artificial Sequence: Synthetic oligonucleotide"
gaaggucccugcuaagccuu

SEQ ID NO: 2170 - RNA, 20 nt, Artificial Sequence
  source: /note="Description of Artificial Sequence: Synthetic oligonucleotide"
cugacucugccuuucuggag

SEQ ID NO: 2171 - RNA, 20 nt, Artificial Sequence
  source: /note="Description of Artificial Sequence: Synthetic oligonucleotide"
uuuguggcagaacaguucaa

SEQ ID NO: 2172 - RNA, 20 nt, Artificial Sequence
  source: /note="Description of Artificial Sequence: Synthetic oligonucleotide"
agcaaaaucaccccaguuug

SEQ ID NO: 2173 - RNA, 20 nt, Artificial Sequence
  source: /note="Description of Artificial Sequence: Synthetic oligonucleotide"
ugagaggcuuggguccuccc

SEQ ID NO: 2174 - RNA, 20 nt, Artificial Sequence
  source: /note="Description of Artificial Sequence: Synthetic oligonucleotide"
agaggcuuggguccucccug

SEQ ID NO: 2175 - RNA, 20 nt, Artificial Sequence
  source: /note="Description of Artificial Sequence: Synthetic oligonucleotide"
ucaacucucaucucucccca

SEQ ID NO: 2176 - RNA, 20 nt, Artificial Sequence
  source: /note="Description of Artificial Sequence: Synthetic oligonucleotide"
guggccaccucuaagaaguc

SEQ ID NO: 2177 - RNA, 20 nt, Artificial Sequence
  source: /note="Description of Artificial Sequence: Synthetic oligonucleotide"
guugccaccagacuucuuag

SEQ ID NO: 2178 - RNA, 20 nt, Artificial Sequence
  source: /note="Description of Artificial Sequence: Synthetic oligonucleotide"
gccaccagacuucuuagagg

SEQ ID NO: 2179 - RNA, 20 nt, Artificial Sequence
  source: /note="Description of Artificial Sequence: Synthetic oligonucleotide"
gaccaccccugggccacacg

SEQ ID NO: 2180 - RNA, 20 nt, Artificial Sequence
  source: /note="Description of Artificial Sequence: Synthetic oligonucleotide"
gccacauccccguguggccc

SEQ ID NO: 2181 - RNA, 20 nt, Artificial Sequence
  source: /note="Description of Artificial Sequence: Synthetic oligonucleotide"
auccccguguggcccagggg

SEQ ID NO: 2182 - RNA, 20 nt, Artificial Sequence
  source: /note="Description of Artificial Sequence: Synthetic oligonucleotide"
uacauucccccacaaugcag

SEQ ID NO: 2183 - RNA, 20 nt, Artificial Sequence
  source: /note="Description of Artificial Sequence: Synthetic oligonucleotide"
ccccacaaugcagcggggcu

SEQ ID NO: 2184 - RNA, 20 nt, Artificial Sequence
  source: /note="Description of Artificial Sequence: Synthetic oligonucleotide"
cggggcuaggcuuuguggac

SEQ ID NO: 2185 - RNA, 20 nt, Artificial Sequence
  source: /note="Description of Artificial Sequence: Synthetic oligonucleotide"
uuuguggacaggugcauccu

SEQ ID NO: 2186 - RNA, 20 nt, Artificial Sequence
  source: /note="Description of Artificial Sequence: Synthetic oligonucleotide"
ccgagggugacaggggugug

SEQ ID NO: 2187 - RNA, 20 nt, Artificial Sequence
  source: /note="Description of Artificial Sequence: Synthetic oligonucleotide"
gggcugcaguuuuccuuccu

SEQ ID NO: 2188 - RNA, 20 nt, Artificial Sequence
  source: /note="Description of Artificial Sequence: Synthetic oligonucleotide"
caauggggacagguuagcca

SEQ ID NO: 2189 - RNA, 20 nt, Artificial Sequence
  source: /note="Description of Artificial Sequence: Synthetic oligonucleotide"
aggcagccuggacuuccggc

SEQ ID NO: 2190 - RNA, 20 nt, Artificial Sequence
  source: /note="Description of Artificial Sequence: Synthetic oligonucleotide"
ugggaaauggcccaggagau

SEQ ID NO: 2191 - RNA, 20 nt, Artificial Sequence
  source: /note="Description of Artificial Sequence: Synthetic oligonucleotide"
caucuccugggccauuuccc

SEQ ID NO: 2192 - RNA, 20 nt, Artificial Sequence
  source: /note="Description of Artificial Sequence: Synthetic oligonucleotide"
cccagggcccccggccauca

SEQ ID NO: 2193 - RNA, 20 nt, Artificial Sequence
  source: /note="Description of Artificial Sequence: Synthetic oligonucleotide"
ccccugauggccgggggccc

SEQ ID NO: 2194 - RNA, 20 nt, Artificial Sequence
  source: /note="Description of Artificial Sequence: Synthetic oligonucleotide"
cccugauggccgggggcccu

SEQ ID NO: 2195 - RNA, 20 nt, Artificial Sequence
  source: /note="Description of Artificial Sequence: Synthetic oligonucleotide"
uggacaagggggugcuccca

SEQ ID NO: 2196 - RNA, 20 nt, Artificial Sequence
  source: /note="Description of Artificial Sequence: Synthetic oligonucleotide"
cuggacaagggggugcuccc

SEQ ID NO: 2197 - RNA, 20 nt, Artificial Sequence
  source: /note="Description of Artificial Sequence: Synthetic oligonucleotide"
uccccagccuccuggacaag

SEQ ID NO: 2198 - RNA, 20 nt, Artificial Sequence
  source: /note="Description of Artificial Sequence: Synthetic oligonucleotide"
acccccuuguccaggaggcu

SEQ ID NO: 2199 - RNA, 20 nt, Artificial Sequence
  source: /note="Description of Artificial Sequence: Synthetic oligonucleotide"
gagcccucuagcucagcgug

SEQ ID NO: 2200 - RNA, 20 nt, Artificial Sequence
  source: /note="Description of Artificial Sequence: Synthetic oligonucleotide"
agagcccucuagcucagcgu

SEQ ID NO: 2201 - RNA, 20 nt, Artificial Sequence
  source: /note="Description of Artificial Sequence: Synthetic oligonucleotide"
uagagcccucuagcucagcg

SEQ ID NO: 2202 - RNA, 20 nt, Artificial Sequence
  source: /note="Description of Artificial Sequence: Synthetic oligonucleotide"
aaagccuugguuccccccgg

SEQ ID NO: 2203 - RNA, 20 nt, Artificial Sequence
  source: /note="Description of Artificial Sequence: Synthetic oligonucleotide"
uacaccaccggggggaacca

SEQ ID NO: 2204 - RNA, 20 nt, Artificial Sequence
  source: /note="Description of Artificial Sequence: Synthetic oligonucleotide"
aucuuggagccagucgaacc

SEQ ID NO: 2205 - RNA, 20 nt, Artificial Sequence
  source: /note="Description of Artificial Sequence: Synthetic oligonucleotide"
cuccaagaugaggacgagca

SEQ ID NO: 2206 - RNA, 20 nt, Artificial Sequence
  source: /note="Description of Artificial Sequence: Synthetic oligonucleotide"
gugcagcccugcguccuggg

SEQ ID NO: 2207 - RNA, 20 nt, Artificial Sequence
  source: /note="Description of Artificial Sequence: Synthetic oligonucleotide"
cagggauccccccaggacgc

SEQ ID NO: 2208 - RNA, 20 nt, Artificial Sequence
  source: /note="Description of Artificial Sequence: Synthetic oligonucleotide"
acccuccugaagggggcgag

SEQ ID NO: 2209 - RNA, 20 nt, Artificial Sequence
  source: /note="Description of Artificial Sequence: Synthetic oligonucleotide"
cgccaccccucgcccccuuc

SEQ ID NO: 2210 - RNA, 20 nt, Artificial Sequence
  source: /note="Description of Artificial Sequence: Synthetic oligonucleotide"
cagagaagaucuggaggacc

SEQ ID NO: 2211 - RNA, 20 nt, Artificial Sequence
  source: /note="Description of Artificial Sequence: Synthetic oligonucleotide"
agaagaucuggaggaccugg

SEQ ID NO: 2212 - RNA, 20 nt, Artificial Sequence
  source: /note="Description of Artificial Sequence: Synthetic oligonucleotide"
gggccuacccacgucagccu

SEQ ID NO: 2213 - RNA, 20 nt, Artificial Sequence
  source: /note="Description of Artificial Sequence: Synthetic oligonucleotide"
guucacuguccaggucugug

SEQ ID NO: 2214 - RNA, 20 nt, Artificial Sequence
  source: /note="Description of Artificial Sequence: Synthetic oligonucleotide"
acagaccuggacagugaacu

SEQ ID NO: 2215 - RNA, 20 nt, Artificial Sequence
  source: /note="Description of Artificial Sequence: Synthetic oligonucleotide"
gaccuggacagugaacucgg

SEQ ID NO: 2216 - RNA, 20 nt, Artificial Sequence
  source: /note="Description of Artificial Sequence: Synthetic oligonucleotide"
cuccagcagcucacacaggu

SEQ ID NO: 2217 - RNA, 20 nt, Artificial Sequence
  source: /note="Description of Artificial Sequence: Synthetic oligonucleotide"
ccuccuccagcagcucacac

SEQ ID NO: 2218 - RNA, 20 nt, Artificial Sequence
  source: /note="Description of Artificial Sequence: Synthetic oligonucleotide"
cuaccugugugagcugcugg

SEQ ID NO: 2219 - RNA, 20 nt, Artificial Sequence
  source: /note="Description of Artificial Sequence: Synthetic oligonucleotide"
aucugggcuggccaccccuu

SEQ ID NO: 2220 - RNA, 20 nt, Artificial Sequence
  source: /note="Description of Artificial Sequence: Synthetic oligonucleotide"
guccucguccucaucugggc

SEQ ID NO: 2221 - RNA, 20 nt, Artificial Sequence
  source: /note="Description of Artificial Sequence: Synthetic oligonucleotide"
ggccagcccagaugaggacg

SEQ ID NO: 2222 - RNA, 20 nt, Artificial Sequence
  source: /note="Description of Artificial Sequence: Synthetic oligonucleotide"
cagcaucuacuucaagcaga

SEQ ID NO: 2223 - RNA, 20 nt, Artificial Sequence
  source: /note="Description of Artificial Sequence: Synthetic oligonucleotide"
ggugcuggcucaugugcucc

SEQ ID NO: 2224 - RNA, 20 nt, Artificial Sequence
  source: /note="Description of Artificial Sequence: Synthetic oligonucleotide"
cgcagggggcuccuggcccg

SEQ ID NO: 2225 - RNA, 20 nt, Artificial Sequence
  source: /note="Description of Artificial Sequence: Synthetic oligonucleotide"
agcggggccagguccgcagg

SEQ ID NO: 2226 - RNA, 20 nt, Artificial Sequence
  source: /note="Description of Artificial Sequence: Synthetic oligonucleotide"
cccugcggaccuggccccgc

SEQ ID NO: 2227 - RNA, 20 nt, Artificial Sequence
  source: /note="Description of Artificial Sequence: Synthetic oligonucleotide"
cacacuccccgcaggccagc

SEQ ID NO: 2228 - RNA, 20 nt, Artificial Sequence
  source: /note="Description of Artificial Sequence: Synthetic oligonucleotide"
gcagcaccggcagcugcauc

SEQ ID NO: 2229 - RNA, 20 nt, Artificial Sequence
  source: /note="Description of Artificial Sequence: Synthetic oligonucleotide"
caaaagcugaagcaaguucc

SEQ ID NO: 2230 - RNA, 20 nt, Artificial Sequence
  source: /note="Description of Artificial Sequence: Synthetic oligonucleotide"
gccucccggcccucgucucc

SEQ ID NO: 2231 - RNA, 20 nt, Artificial Sequence
  source: /note="Description of Artificial Sequence: Synthetic oligonucleotide"
aguuccaggagacgagggcc

SEQ ID NO: 2232 - RNA, 20 nt, Artificial Sequence
  source: /note="Description of Artificial Sequence: Synthetic oligonucleotide"
ggcacugcagccgugccucc

SEQ ID NO: 2233 - RNA, 20 nt, Artificial Sequence
  source: /note="Description of Artificial Sequence: Synthetic oligonucleotide"
uggugccaaagacacacuua

SEQ ID NO: 2234 - RNA, 20 nt, Artificial Sequence
  source: /note="Description of Artificial Sequence: Synthetic oligonucleotide"
cagugcccuaagugugucuu

SEQ ID NO: 2235 - RNA, 20 nt, Artificial Sequence
  source: /note="Description of Artificial Sequence: Synthetic oligonucleotide"
cuuuggcaccaauucaucca

SEQ ID NO: 2236 - RNA, 20 nt, Artificial Sequence
  source: /note="Description of Artificial Sequence: Synthetic oligonucleotide"
cagaccaccaaagagccuuu

SEQ ID NO: 2237 - RNA, 20 nt, Artificial Sequence
  source: /note="Description of Artificial Sequence: Synthetic oligonucleotide"
gccccgcugcugccuccaaa

SEQ ID NO: 2238 - RNA, 20 nt, Artificial Sequence
  source: /note="Description of Artificial Sequence: Synthetic oligonucleotide"
gggcgcuggccucagggcug

SEQ ID NO: 2239 - RNA, 20 nt, Artificial Sequence
  source: /note="Description of Artificial Sequence: Synthetic oligonucleotide"
uccguagggcugauagagga

SEQ ID NO: 2240 - RNA, 20 nt, Artificial Sequence
  source: /note="Description of Artificial Sequence: Synthetic oligonucleotide"
cagcuccguagggcugauag

SEQ ID NO: 2241 - RNA, 20 nt, Artificial Sequence
  source: /note="Description of Artificial Sequence: Synthetic oligonucleotide"
aggccaacggcagcuccgua

SEQ ID NO: 2242 - RNA, 20 nt, Artificial Sequence
  source: /note="Description of Artificial Sequence: Synthetic oligonucleotide"
cagcccuacggagcugccgu

SEQ ID NO: 2243 - RNA, 20 nt, Artificial Sequence
  source: /note="Description of Artificial Sequence: Synthetic oligonucleotide"
agcaggcucucgcugggcgc

SEQ ID NO: 2244 - RNA, 20 nt, Artificial Sequence
  source: /note="Description of Artificial Sequence: Synthetic oligonucleotide"
gagcaggcucucgcugggcg

SEQ ID NO: 2245 - RNA, 20 nt, Artificial Sequence
  source: /note="Description of Artificial Sequence: Synthetic oligonucleotide"
gcucagggagcacgugaggc

SEQ ID NO: 2246 - RNA, 20 nt, Artificial Sequence
  source: /note="Description of Artificial Sequence: Synthetic oligonucleotide"
auccuccucccaguggggau

SEQ ID NO: 2247 - RNA, 20 nt, Artificial Sequence
  source: /note="Description of Artificial Sequence: Synthetic oligonucleotide"
uggugcaugcccauccccac

SEQ ID NO: 2248 - RNA, 20 nt, Artificial Sequence
  source: /note="Description of Artificial Sequence: Synthetic oligonucleotide"
ggugcaugcccauccccacu

SEQ ID NO: 2249 - RNA, 20 nt, Artificial Sequence
  source: /note="Description of Artificial Sequence: Synthetic oligonucleotide"
gcaugcccauccccacuggg

SEQ ID NO: 2250 - RNA, 20 nt, Artificial Sequence
  source: /note="Description of Artificial Sequence: Synthetic oligonucleotide"
ccacugggaggaggauggcg

SEQ ID NO: 2251 - RNA, 20 nt, Artificial Sequence
  source: /note="Description of Artificial Sequence: Synthetic oligonucleotide"
cauccuggcuagugccuggc

SEQ ID NO: 2252 - RNA, 20 nt, Artificial Sequence
  source: /note="Description of Artificial Sequence: Synthetic oligonucleotide"
uggcaaagcugagccguccu

SEQ ID NO: 2253 - RNA, 20 nt, Artificial Sequence
  source: /note="Description of Artificial Sequence: Synthetic oligonucleotide"
cgccacaugggggccaagga

SEQ ID NO: 2254 - RNA, 20 nt, Artificial Sequence
  source: /note="Description of Artificial Sequence: Synthetic oligonucleotide"
cucccgccacaugggggcca

SEQ ID NO: 2255 - RNA, 20 nt, Artificial Sequence
  source: /note="Description of Artificial Sequence: Synthetic oligonucleotide"
agccguccuuggcccccaug

SEQ ID NO: 2256 - RNA, 20 nt, Artificial Sequence
  source: /note="Description of Artificial Sequence: Synthetic oligonucleotide"
guccuuggcccccauguggc

SEQ ID NO: 2257 - RNA, 20 nt, Artificial Sequence
  source: /note="Description of Artificial Sequence: Synthetic oligonucleotide"
auguggcgggagaacccugc

SEQ ID NO: 2258 - RNA, 20 nt, Artificial Sequence
  source: /note="Description of Artificial Sequence: Synthetic oligonucleotide"
ggcuggggucguauccagca

SEQ ID NO: 2259 - RNA, 20 nt, Artificial Sequence
  source: /note="Description of Artificial Sequence: Synthetic oligonucleotide"
aggcuggggucguauccagc

SEQ ID NO: 2260 - RNA, 20 nt, Artificial Sequence
  source: /note="Description of Artificial Sequence: Synthetic oligonucleotide"
ggcauccugggccaaaggcc

SEQ ID NO: 2261 - RNA, 20 nt, Artificial Sequence
  source: /note="Description of Artificial Sequence: Synthetic oligonucleotide"
uacgaccccagccuggccuu

SEQ ID NO: 2262 - RNA, 20 nt, Artificial Sequence
  source: /note="Description of Artificial Sequence: Synthetic oligonucleotide"
cugcuggcauccugggccaa

SEQ ID NO: 2263 - RNA, 20 nt, Artificial Sequence
  source: /note="Description of Artificial Sequence: Synthetic oligonucleotide"
aaucucugaugcucagcugc

SEQ ID NO: 2264 - RNA, 20 nt, Artificial Sequence
  source: /note="Description of Artificial Sequence: Synthetic oligonucleotide"
ugcaggaguggcuuugacag

SEQ ID NO: 2265 - RNA, 20 nt, Artificial Sequence
  source: /note="Description of Artificial Sequence: Synthetic oligonucleotide"
uggcccgugccaugcaggag

SEQ ID NO: 2266 - RNA, 20 nt, Artificial Sequence
  source: /note="Description of Artificial Sequence: Synthetic oligonucleotide"
aagccacuccugcauggcac

SEQ ID NO: 2267 - RNA, 20 nt, Artificial Sequence
  source: /note="Description of Artificial Sequence: Synthetic oligonucleotide"
ccagaggccucucggaaggc

SEQ ID NO: 2268 - RNA, 20 nt, Artificial Sequence
  source: /note="Description of Artificial Sequence: Synthetic oligonucleotide"
gagcuguaaggaguaggggg

SEQ ID NO: 2269 - RNA, 20 nt, Artificial Sequence
  source: /note="Description of Artificial Sequence: Synthetic oligonucleotide"
ucccgagcuguaaggaguag

SEQ ID NO: 2270 - RNA, 20 nt, Artificial Sequence
  source: /note="Description of Artificial Sequence: Synthetic oligonucleotide"
cccccuacuccuuacagcuc

SEQ ID NO: 2271 - RNA, 20 nt, Artificial Sequence
  source: /note="Description of Artificial Sequence: Synthetic oligonucleotide"
uccguucccccagcccuugu

SEQ ID NO: 2272 - RNA, 20 nt, Artificial Sequence
  source: /note="Description of Artificial Sequence: Synthetic oligonucleotide"
cuccguucccccagcccuug

SEQ ID NO: 2273 - RNA, 20 nt, Artificial Sequence
  source: /note="Description of Artificial Sequence: Synthetic oligonucleotide"
ccguccacccacaagggcug

SEQ ID NO: 2274 - RNA, 20 nt, Artificial Sequence
  source: /note="Description of Artificial Sequence: Synthetic oligonucleotide"
uguagugcugaccuccgaga

SEQ ID NO: 2275 - RNA, 20 nt, Artificial Sequence
  source: /note="Description of Artificial Sequence: Synthetic oligonucleotide"
gaugaggcuggggguggcua

SEQ ID NO: 2276 - RNA, 20 nt, Artificial Sequence
  source: /note="Description of Artificial Sequence: Synthetic oligonucleotide"
ccgccugcgggaugaggcug

SEQ ID NO: 2277 - RNA, 20 nt, Artificial Sequence
  source: /note="Description of Artificial Sequence: Synthetic oligonucleotide"
ccccagccucaucccgcagg

SEQ ID NO: 2278 - RNA, 20 nt, Artificial Sequence
  source: /note="Description of Artificial Sequence: Synthetic oligonucleotide"
gguggccucuacugccugca

SEQ ID NO: 2279 - RNA, 20 nt, Artificial Sequence
  source: /note="Description of Artificial Sequence: Synthetic oligonucleotide"
ggguggccucuacugccugc

SEQ ID NO: 2280 - RNA, 20 nt, Artificial Sequence
  source: /note="Description of Artificial Sequence: Synthetic oligonucleotide"
agaggcccugcaggcaguag

SEQ ID NO: 2281 - RNA, 20 nt, Artificial Sequence
  source: /note="Description of Artificial Sequence: Synthetic oligonucleotide"
aggcaguagaggccacccag

SEQ ID NO: 2282 - RNA, 20 nt, Artificial Sequence
  source: /note="Description of Artificial Sequence: Synthetic oligonucleotide"
cagcuucgccacgagcacaa

SEQ ID NO: 2283 - RNA, 20 nt, Artificial Sequence
  source: /note="Description of Artificial Sequence: Synthetic oligonucleotide"
uugugcucguggcgaagcug

SEQ ID NO: 2284 - RNA, 20 nt, Artificial Sequence
  source: /note="Description of Artificial Sequence: Synthetic oligonucleotide"
cguggcgaagcuggggccgc

SEQ ID NO: 2285 - RNA, 20 nt, Artificial Sequence
  source: /note="Description of Artificial Sequence: Synthetic oligonucleotide"
gaagcuggggccgcagguca

SEQ ID NO: 2286 - RNA, 20 nt, Artificial Sequence
  source: /note="Description of Artificial Sequence: Synthetic oligonucleotide"
gcuggggccgcaggucaugg

SEQ ID NO: 2287 - RNA, 20 nt, Artificial Sequence
  source: /note="Description of Artificial Sequence: Synthetic oligonucleotide"
cggcagccagggugccccca

SEQ ID NO: 2288 - RNA, 20 nt, Artificial Sequence
  source: /note="Description of Artificial Sequence: Synthetic oligonucleotide"
agcuccucgggcugcaaccu

SEQ ID NO: 2289 - RNA, 20 nt, Artificial Sequence
  source: /note="Description of Artificial Sequence: Synthetic oligonucleotide"
aagguugcagcccgaggagc

SEQ ID NO: 2290 - RNA, 20 nt, Artificial Sequence
  source: /note="Description of Artificial Sequence: Synthetic oligonucleotide"
gcuggcaggcgcccaccccc

SEQ ID NO: 2291 - RNA, 20 nt, Artificial Sequence
  source: /note="Description of Artificial Sequence: Synthetic oligonucleotide"
aggaguguguccagccccag

SEQ ID NO: 2292 - RNA, 20 nt, Artificial Sequence
  source: /note="Description of Artificial Sequence: Synthetic oligonucleotide"
gcuggacacacuccuggaug

SEQ ID NO: 2293 - RNA, 20 nt, Artificial Sequence
  source: /note="Description of Artificial Sequence: Synthetic oligonucleotide"
cacacuccuggauggggauc

SEQ ID NO: 2294 - RNA, 20 nt, Artificial Sequence
  source: /note="Description of Artificial Sequence: Synthetic oligonucleotide"
cuccucgugcuucagugcca

SEQ ID NO: 2295 - RNA, 20 nt, Artificial Sequence
  source: /note="Description of Artificial Sequence: Synthetic oligonucleotide"
ggccauggcacugaagcacg

SEQ ID NO: 2296 - RNA, 20 nt, Artificial Sequence
  source: /note="Description of Artificial Sequence: Synthetic oligonucleotide"
uggcacugaagcacgaggag

SEQ ID NO: 2297 - RNA, 20 nt, Artificial Sequence
  source: /note="Description of Artificial Sequence: Synthetic oligonucleotide"
uggccaagccgaugccguug

SEQ ID NO: 2298 - RNA, 20 nt, Artificial Sequence
  source: /note="Description of Artificial Sequence: Synthetic oligonucleotide"
caucuccgcugaggagguga

SEQ ID NO: 2299 - RNA, 20 nt, Artificial Sequence
  source: /note="Description of Artificial Sequence: Synthetic oligonucleotide"
uagggcagcuucacuuuuaa

SEQ ID NO: 2300 - RNA, 20 nt, Artificial Sequence
  source: /note="Description of Artificial Sequence: Synthetic oligonucleotide"
ugcccagccaugugucuccu

SEQ ID NO: 2301 - RNA, 20 nt, Artificial Sequence
  source: /note="Description of Artificial Sequence: Synthetic oligonucleotide"
ggcccaggagacacauggcu

SEQ ID NO: 2302 - RNA, 20 nt, Artificial Sequence
  source: /note="Description of Artificial Sequence: Synthetic oligonucleotide"
cucccuuagcgccaagcagg

SEQ ID NO: 2303 - RNA, 20 nt, Artificial Sequence
  source: /note="Description of Artificial Sequence: Synthetic oligonucleotide"
cucaagucucucaggagcag

SEQ ID NO: 2304 - RNA, 20 nt, Artificial Sequence
  source: /note="Description of Artificial Sequence: Synthetic oligonucleotide"
gagccacagugaaggccacc

SEQ ID NO: 2305 - RNA, 20 nt, Artificial Sequence
  source: /note="Description of Artificial Sequence: Synthetic oligonucleotide"
agugaaggccaccuggucgg

SEQ ID NO: 2306 - RNA, 20 nt, Artificial Sequence
  source: /note="Description of Artificial Sequence: Synthetic oligonucleotide"
ccuuccuccaguggcuggaa

SEQ ID NO: 2307 - RNA, 20 nt, Artificial Sequence
  source: /note="Description of Artificial Sequence: Synthetic oligonucleotide"
acccacacuccuuccuccag

SEQ ID NO: 2308 - RNA, 20 nt, Artificial Sequence
  source: /note="Description of Artificial Sequence: Synthetic oligonucleotide"
gccacuggaggaaggagugu

SEQ ID NO: 2309 - RNA, 20 nt, Artificial Sequence
  source: /note="Description of Artificial Sequence: Synthetic oligonucleotide"
ccccagguccccagaacaga

SEQ ID NO: 2310 - RNA, 20 nt, Artificial Sequence
  source: /note="Description of Artificial Sequence: Synthetic oligonucleotide"
ggagggggucccaccacucc

SEQ ID NO: 2311 - RNA, 20 nt, Artificial Sequence
  source: /note="Description of Artificial Sequence: Synthetic oligonucleotide"
accuuacaggcagccccagg

SEQ ID NO: 2312 - RNA, 20 nt, Artificial Sequence
  source: /note="Description of Artificial Sequence: Synthetic oligonucleotide"
aaaccuuacaggcagcccca

SEQ ID NO: 2313 - RNA, 20 nt, Artificial Sequence
  source: /note="Description of Artificial Sequence: Synthetic oligonucleotide"
acccccuggggcugccugua

SEQ ID NO: 2314 - RNA, 20 nt, Artificial Sequence
  source: /note="Description of Artificial Sequence: Synthetic oligonucleotide"
ugggaacugacaaaccuuac

SEQ ID NO: 2315 - RNA, 20 nt, Artificial Sequence
  source: /note="Description of Artificial Sequence: Synthetic oligonucleotide"
uccuguuggaaacagacuuc

SEQ ID NO: 2316 - RNA, 20 nt, Artificial Sequence
  source: /note="Description of Artificial Sequence: Synthetic oligonucleotide"
uccagaagucuguuuccaac

SEQ ID NO: 2317 - RNA, 20 nt, Artificial Sequence
  source: /note="Description of Artificial Sequence: Synthetic oligonucleotide"
accacccagggugcuccugu

SEQ ID NO: 2318 - RNA, 20 nt, Artificial Sequence
  source: /note="Description of Artificial Sequence: Synthetic oligonucleotide"
ugccaaugucagaaccaccc

SEQ ID NO: 2319 - RNA, 20 nt, Artificial Sequence
  source: /note="Description of Artificial Sequence: Synthetic oligonucleotide"
gcagacacaaagcccacuug

SEQ ID NO: 2320 - RNA, 20 nt, Artificial Sequence
  source: /note="Description of Artificial Sequence: Synthetic oligonucleotide"
gacacaaagcccacuugggg

SEQ ID NO: 2321 - RNA, 20 nt, Artificial Sequence
  source: /note="Description of Artificial Sequence: Synthetic oligonucleotide"
cgcacuagggguugggggca

SEQ ID NO: 2322 - RNA, 20 nt, Artificial Sequence
  source: /note="Description of Artificial Sequence: Synthetic oligonucleotide"
gcacuagggguugggggcaa

SEQ ID NO: 2323 - RNA, 20 nt, Artificial Sequence
  source: /note="Description of Artificial Sequence: Synthetic oligonucleotide"
cacuagggguugggggcaag

SEQ ID NO: 2324 - RNA, 20 nt, Artificial Sequence
  source: /note="Description of Artificial Sequence: Synthetic oligonucleotide"
gugagcagggcugagaugcg

SEQ ID NO: 2325 - RNA, 20 nt, Artificial Sequence
  source: /note="Description of Artificial Sequence: Synthetic oligonucleotide"
ggaaagcugggagaaccagg

SEQ ID NO: 2326 - RNA, 20 nt, Artificial Sequence
  source: /note="Description of Artificial Sequence: Synthetic oligonucleotide"
ugagcccugcaacuggaguu

SEQ ID NO: 2327 - RNA, 20 nt, Artificial Sequence
  source: /note="Description of Artificial Sequence: Synthetic oligonucleotide"
aagucccuaacuccaguugc

SEQ ID NO: 2328 - RNA, 20 nt, Artificial Sequence
  source: /note="Description of Artificial Sequence: Synthetic oligonucleotide"
auggauguaaugcccucugc

SEQ ID NO: 2329 - RNA, 20 nt, Artificial Sequence
  source: /note="Description of Artificial Sequence: Synthetic oligonucleotide"
gcuguaaauuaaauauuugu

SEQ ID NO: 2330 - RNA, 20 nt, Artificial Sequence
  source: /note="Description of Artificial Sequence: Synthetic oligonucleotide"
ucaaauacucucauagauga

SEQ ID NO: 2331 - RNA, 20 nt, Artificial Sequence
  source: /note="Description of Artificial Sequence: Synthetic oligonucleotide"
auacucucauagaugauggc

SEQ ID NO: 2332 - RNA, 20 nt, Artificial Sequence
  source: /note="Description of Artificial Sequence: Synthetic oligonucleotide"
uccuugacguugccagaugu

SEQ ID NO: 2333 - RNA, 20 nt, Artificial Sequence
  source: /note="Description of Artificial Sequence: Synthetic oligonucleotide"
aggggguaucugggaggguc

SEQ ID NO: 2334 - RNA, 20 nt, Artificial Sequence
  source: /note="Description of Artificial Sequence: Synthetic oligonucleotide"
agggucaggcuuccuggaau

SEQ ID NO: 2335 - RNA, 20 nt, Artificial Sequence
  source: /note="Description of Artificial Sequence: Synthetic oligonucleotide"
ggagcaaaagggacagccac

SEQ ID NO: 2336 - RNA, 20 nt, Artificial Sequence
  source: /note="Description of Artificial Sequence: Synthetic oligonucleotide"
gagcaaaagggacagccacg

SEQ ID NO: 2337 - RNA, 20 nt, Artificial Sequence
  source: /note="Description of Artificial Sequence: Synthetic oligonucleotide"
uggacugccuuucuuccccg

SEQ ID NO: 2338 - RNA, 20 nt, Artificial Sequence
  source: /note="Description of Artificial Sequence: Synthetic oligonucleotide"
gggacagccacggggaagaa

SEQ ID NO: 2339 - RNA, 20 nt, Artificial Sequence
  source: /note="Description of Artificial Sequence: Synthetic oligonucleotide"
cggggaagaaaggcagucca

SEQ ID NO: 2340 - RNA, 20 nt, Artificial Sequence
  source: /note="Description of Artificial Sequence: Synthetic oligonucleotide"
ccaaccccuccccauauuca

SEQ ID NO: 2341 - RNA, 20 nt, Artificial Sequence
  source: /note="Description of Artificial Sequence: Synthetic oligonucleotide"
ccugaauauggggagggguu

SEQ ID NO: 2342 - RNA, 20 nt, Artificial Sequence
  source: /note="Description of Artificial Sequence: Synthetic oligonucleotide"
cugaauauggggagggguug

SEQ ID NO: 2343 - RNA, 20 nt, Artificial Sequence
  source: /note="Description of Artificial Sequence: Synthetic oligonucleotide"
gaaggugccugggucaaagu

SEQ ID NO: 2344 - RNA, 20 nt, Artificial Sequence
  source: /note="Description of Artificial Sequence: Synthetic oligonucleotide"
ugaugcgcugugacuucugc

SEQ ID NO: 2345 - RNA, 20 nt, Artificial Sequence
  source: /note="Description of Artificial Sequence: Synthetic oligonucleotide"
cggggcuggcuucgacacac

SEQ ID NO: 2346 - RNA, 20 nt, Artificial Sequence
  source: /note="Description of Artificial Sequence: Synthetic oligonucleotide"
gggcccgggcguggcuggag

SEQ ID NO: 2347 - RNA, 20 nt, Artificial Sequence
  source: /note="Description of Artificial Sequence: Synthetic oligonucleotide"
gaagucacguaggugggccc

SEQ ID NO: 2348 - RNA, 20 nt, Artificial Sequence
  source: /note="Description of Artificial Sequence: Synthetic oligonucleotide"
uggugauaccgaagucacgu

SEQ ID NO: 2349 - RNA, 20 nt, Artificial Sequence
  source: /note="Description of Artificial Sequence: Synthetic oligonucleotide"
ugagacagugagcucccagu

SEQ ID NO: 2350 - RNA, 20 nt, Artificial Sequence
  source: /note="Description of Artificial Sequence: Synthetic oligonucleotide"
ucucggcccagggggcuggg

SEQ ID NO: 2351 - RNA, 20 nt, Artificial Sequence
  source: /note="Description of Artificial Sequence: Synthetic oligonucleotide"
ggcucucggcccagggggcu

SEQ ID NO: 2352 - RNA, 20 nt, Artificial Sequence
  source: /note="Description of Artificial Sequence: Synthetic oligonucleotide"
acccccaggcucucggccca

SEQ ID NO: 2353 - RNA, 20 nt, Artificial Sequence
  source: /note="Description of Artificial Sequence: Synthetic oligonucleotide"
cccccugggccgagagccug

SEQ ID NO: 2354 - RNA, 20 nt, Artificial Sequence
  source: /note="Description of Artificial Sequence: Synthetic oligonucleotide"
aagcugccaggcggaccccc

SEQ ID NO: 2355 - RNA, 20 nt, Artificial Sequence
  source: /note="Description of Artificial Sequence: Synthetic oligonucleotide"
ccaggguccucagcccaggu

SEQ ID NO: 2356 - RNA, 20 nt, Artificial Sequence
  source: /note="Description of Artificial Sequence: Synthetic oligonucleotide"
cccaggguccucagcccagg

SEQ ID NO: 2357 - RNA, 20 nt, Artificial Sequence
  source: /note="Description of Artificial Sequence: Synthetic oligonucleotide"
ccaucuccauaggcuggccc

SEQ ID NO: 2358 - RNA, 20 nt, Artificial Sequence
  source: /note="Description of Artificial Sequence: Synthetic oligonucleotide"
cagccuauggagaugguaag

SEQ ID NO: 2359 - RNA, 20 nt, Artificial Sequence
  source: /note="Description of Artificial Sequence: Synthetic oligonucleotide"
ccuauggagaugguaagggg

SEQ ID NO: 2360 - RNA, 20 nt, Artificial Sequence
  source: /note="Description of Artificial Sequence: Synthetic oligonucleotide"
cuauggagaugguaagggga

SEQ ID NO: 2361 - RNA, 20 nt, Artificial Sequence
  source: /note="Description of Artificial Sequence: Synthetic oligonucleotide"
gcuggagccccauccuuccc

SEQ ID NO: 2362 - RNA, 20 nt, Artificial Sequence
  source: /note="Description of Artificial Sequence: Synthetic oligonucleotide"
aggggcccagagcauuggag

SEQ ID NO: 2363 - RNA, 20 nt, Artificial Sequence
  source: /note="Description of Artificial Sequence: Synthetic oligonucleotide"
ggcccagagcauuggagggg

SEQ ID NO: 2364 - RNA, 20 nt, Artificial Sequence
  source: /note="Description of Artificial Sequence: Synthetic oligonucleotide"
cccagagcauuggaggggcg

SEQ ID NO: 2365 - RNA, 20 nt, Artificial Sequence
  source: /note="Description of Artificial Sequence: Synthetic oligonucleotide"
gggcagccgcucagcuuucc

SEQ ID NO: 2366 - RNA, 20 nt, Artificial Sequence
  source: /note="Description of Artificial Sequence: Synthetic oligonucleotide"
uaaauagcagggugguugua

SEQ ID NO: 2367 - RNA, 20 nt, Artificial Sequence
  source: /note="Description of Artificial Sequence: Synthetic oligonucleotide"
agaaaggacaccuaaauagc

SEQ ID NO: 2368 - RNA, 20 nt, Artificial Sequence
  source: /note="Description of Artificial Sequence: Synthetic oligonucleotide"
uuacaaccacccugcuauuu

SEQ ID NO: 2369 - RNA, 20 nt, Artificial Sequence
  source: /note="Description of Artificial Sequence: Synthetic oligonucleotide"
agauccugagugaaacagaa

SEQ ID NO: 2370 - RNA, 20 nt, Artificial Sequence
  source: /note="Description of Artificial Sequence: Synthetic oligonucleotide"
guguccuuucuguuucacuc

SEQ ID NO: 2371 - RNA, 20 nt, Artificial Sequence
  source: /note="Description of Artificial Sequence: Synthetic oligonucleotide"
cauuugucaaagucacuggc

SEQ ID NO: 2372 - RNA, 20 nt, Artificial Sequence
  source: /note="Description of Artificial Sequence: Synthetic oligonucleotide"
ucauuaacagcaaagaaucu

SEQ ID NO: 2373 - RNA, 20 nt, Artificial Sequence
  source: /note="Description of Artificial Sequence: Synthetic oligonucleotide"
gucauuaacagcaaagaauc

SEQ ID NO: 2374 - RNA, 20 nt, Artificial Sequence
  source: /note="Description of Artificial Sequence: Synthetic oligonucleotide"
aaaaaucuagccucuaggcu

SEQ ID NO: 2375 - RNA, 20 nt, Artificial Sequence
  source: /note="Description of Artificial Sequence: Synthetic oligonucleotide"
ugguugaaaaucuagacucu

SEQ ID NO: 2376 - RNA, 20 nt, Artificial Sequence
  source: /note="Description of Artificial Sequence: Synthetic oligonucleotide"
caaccaauguuugcuuuauc

SEQ ID NO: 2377 - RNA, 20 nt, Artificial Sequence
  source: /note="Description of Artificial Sequence: Synthetic oligonucleotide"
aaaaucuuaguacaggggcc

SEQ ID NO: 2378 - RNA, 20 nt, Artificial Sequence
  source: /note="Description of Artificial Sequence: Synthetic oligonucleotide"
cacguuaaaaucuuaguaca

SEQ ID NO: 2379 - RNA, 20 nt, Artificial Sequence
  source: /note="Description of Artificial Sequence: Synthetic oligonucleotide"
acacguuaaaaucuuaguac

SEQ ID NO: 2380 - RNA, 20 nt, Artificial Sequence
  source: /note="Description of Artificial Sequence: Synthetic oligonucleotide"
aaacagggacauggccggug

SEQ ID NO: 2381 - RNA, 20 nt, Artificial Sequence
  source: /note="Description of Artificial Sequence: Synthetic oligonucleotide"
guggcaaagaagaugaccua

SEQ ID NO: 2382 - RNA, 20 nt, Artificial Sequence
  source: /note="Description of Artificial Sequence: Synthetic oligonucleotide"
guggugucucuaguggagga

SEQ ID NO: 2383 - RNA, 20 nt, Artificial Sequence
  source: /note="Description of Artificial Sequence: Synthetic oligonucleotide"
ccuucaccaaauaggacuua

SEQ ID NO: 2384 - RNA, 20 nt, Artificial Sequence
  source: /note="Description of Artificial Sequence: Synthetic oligonucleotide"
ccugggcuccuucaccaaau

SEQ ID NO: 2385 - RNA, 20 nt, Artificial Sequence
  source: /note="Description of Artificial Sequence: Synthetic oligonucleotide"
ccuuugcagugcccaguccu

SEQ ID NO: 2386 - RNA, 20 nt, Artificial Sequence
  source: /note="Description of Artificial Sequence: Synthetic oligonucleotide"
caaagggaguggacaaguga

SEQ ID NO: 2387 - RNA, 20 nt, Artificial Sequence
  source: /note="Description of Artificial Sequence: Synthetic oligonucleotide"
aaagccaggcugugcaagac

SEQ ID NO: 2388 - RNA, 20 nt, Artificial Sequence
  source: /note="Description of Artificial Sequence: Synthetic oligonucleotide"
ccaaguucucugccuuguaa

SEQ ID NO: 2389 - RNA, 20 nt, Artificial Sequence
  source: /note="Description of Artificial Sequence: Synthetic oligonucleotide"
ccuuuacaaggcagagaacu

SEQ ID NO: 2390 - RNA, 20 nt, Artificial Sequence
  source: /note="Description of Artificial Sequence: Synthetic oligonucleotide"
acuuggcuacaaaaaguagu

SEQ ID NO: 2391 - RNA, 20 nt, Artificial Sequence
  source: /note="Description of Artificial Sequence: Synthetic oligonucleotide"
cuuggcuacaaaaaguaguu

SEQ ID NO: 2392 - RNA, 20 nt, Artificial Sequence
  source: /note="Description of Artificial Sequence: Synthetic oligonucleotide"
auggagagugucugaacagg

SEQ ID NO: 2393 - RNA, 20 nt, Artificial Sequence
  source: /note="Description of Artificial Sequence: Synthetic oligonucleotide"
ugaacaggggguaucgcccc

SEQ ID NO: 2394 - RNA, 20 nt, Artificial Sequence
  source: /note="Description of Artificial Sequence: Synthetic oligonucleotide"
aguaccgaaggggccgggug

SEQ ID NO: 2395 - RNA, 20 nt, Artificial Sequence
  source: /note="Description of Artificial Sequence: Synthetic oligonucleotide"
caaguaggaauaguaccgaa

SEQ ID NO: 2396 - RNA, 20 nt, Artificial Sequence
  source: /note="Description of Artificial Sequence: Synthetic oligonucleotide"
ggaccccagcagcugcaagu

SEQ ID NO: 2397 - RNA, 20 nt, Artificial Sequence
  source: /note="Description of Artificial Sequence: Synthetic oligonucleotide"
auuccuacuugcagcugcug

SEQ ID NO: 2398 - RNA, 20 nt, Artificial Sequence
  source: /note="Description of Artificial Sequence: Synthetic oligonucleotide"
ggcauucaugagccugcaaa

SEQ ID NO: 2399 - RNA, 20 nt, Artificial Sequence
  source: /note="Description of Artificial Sequence: Synthetic oligonucleotide"
gcauucaugagccugcaaag

SEQ ID NO: 2400 - RNA, 20 nt, Artificial Sequence
  source: /note="Description of Artificial Sequence: Synthetic oligonucleotide"
ucaugagccugcaaagggga

SEQ ID NO: 2401 - RNA, 20 nt, Artificial Sequence
  source: /note="Description of Artificial Sequence: Synthetic oligonucleotide"
gagccugcaaaggggagggu

SEQ ID NO: 2402 - RNA, 20 nt, Artificial Sequence
  source: /note="Description of Artificial Sequence: Synthetic oligonucleotide"
ucugaaccuccaaggagagg

SEQ ID NO: 2403 - RNA, 20 nt, Artificial Sequence
  source: /note="Description of Artificial Sequence: Synthetic oligonucleotide"
cucugaaccuccaaggagag

SEQ ID NO: 2404 - RNA, 20 nt, Artificial Sequence
  source: /note="Description of Artificial Sequence: Synthetic oligonucleotide"
cuaucaaagcccccucuccu

SEQ ID NO: 2405 - RNA, 20 nt, Artificial Sequence
  source: /note="Description of Artificial Sequence: Synthetic oligonucleotide"
ucucugaaccuccaaggaga

SEQ ID NO: 2406 - RNA, 20 nt, Artificial Sequence
  source: /note="Description of Artificial Sequence: Synthetic oligonucleotide"
cgugggugagcugagugccu

SEQ ID NO: 2407 - RNA, 20 nt, Artificial Sequence
  source: /note="Description of Artificial Sequence: Synthetic oligonucleotide"
gucuggcuuguagugucuca

SEQ ID NO: 2408 - RNA, 20 nt, Artificial Sequence
  source: /note="Description of Artificial Sequence: Synthetic oligonucleotide"
ggcuuguagugucucagggg

SEQ ID NO: 2409 - RNA, 20 nt, Artificial Sequence
  source: /note="Description of Artificial Sequence: Synthetic oligonucleotide"
ggguggcugcgagacagagc

SEQ ID NO: 2410 - RNA, 20 nt, Artificial Sequence
  source: /note="Description of Artificial Sequence: Synthetic oligonucleotide"
gcgagacagagcuggcucug

SEQ ID NO: 2411 - RNA, 20 nt, Artificial Sequence
  source: /note="Description of Artificial Sequence: Synthetic oligonucleotide"
cuaggggugcaggaggcacu

SEQ ID NO: 2412 - RNA, 20 nt, Artificial Sequence
  source: /note="Description of Artificial Sequence: Synthetic oligonucleotide"
agccagguuuggcacugccc

SEQ ID NO: 2413 - RNA, 20 nt, Artificial Sequence
  source: /note="Description of Artificial Sequence: Synthetic oligonucleotide"
cccucccaaggacaaggcca

SEQ ID NO: 2414 - RNA, 20 nt, Artificial Sequence
  source: /note="Description of Artificial Sequence: Synthetic oligonucleotide"
agcucucccucccaaggaca

SEQ ID NO: 2415 - RNA, 20 nt, Artificial Sequence
  source: /note="Description of Artificial Sequence: Synthetic oligonucleotide"
ggucauagcucucccuccca

SEQ ID NO: 2416 - RNA, 20 nt, Artificial Sequence
  source: /note="Description of Artificial Sequence: Synthetic oligonucleotide"
agugaauaacugcgaggcag

SEQ ID NO: 2417 - RNA, 20 nt, Artificial Sequence
  source: /note="Description of Artificial Sequence: Synthetic oligonucleotide"
gaggcagaggguuggcgguu

SEQ ID NO: 2418 - RNA, 20 nt, Artificial Sequence
  source: /note="Description of Artificial Sequence: Synthetic oligonucleotide"
aggcagaggguuggcgguua

SEQ ID NO: 2419 - RNA, 20 nt, Artificial Sequence
  source: /note="Description of Artificial Sequence: Synthetic oligonucleotide"
auguugcauauccuuacuua

SEQ ID NO: 2420 - RNA, 20 nt, Artificial Sequence
  source: /note="Description of Artificial Sequence: Synthetic oligonucleotide"
uggaagccuugccuuaagua

SEQ ID NO: 2421 - RNA, 20 nt, Artificial Sequence
  source: /note="Description of Artificial Sequence: Synthetic oligonucleotide"
ugcaacauuagggcuagguc

SEQ ID NO: 2422 - RNA, 20 nt, Artificial Sequence
  source: /note="Description of Artificial Sequence: Synthetic oligonucleotide"
gucugggcacuggcgcugca

SEQ ID NO: 2423 - RNA, 20 nt, Artificial Sequence
  source: /note="Description of Artificial Sequence: Synthetic oligonucleotide"
cccacuuagggagagggggc

SEQ ID NO: 2424 - RNA, 20 nt, Artificial Sequence
  source: /note="Description of Artificial Sequence: Synthetic oligonucleotide"
cuccugcccacuuagggaga

SEQ ID NO: 2425 - RNA, 20 nt, Artificial Sequence
  source: /note="Description of Artificial Sequence: Synthetic oligonucleotide"
ccuccugcccacuuagggag

SEQ ID NO: 2426 - RNA, 20 nt, Artificial Sequence
  source: /note="Description of Artificial Sequence: Synthetic oligonucleotide"
gccugcccccucucccuaag

SEQ ID NO: 2427 - RNA, 20 nt, Artificial Sequence
  source: /note="Description of Artificial Sequence: Synthetic oligonucleotide"
ccucucccuaagugggcagg

SEQ ID NO: 2428 - RNA, 20 nt, Artificial Sequence
  source: /note="Description of Artificial Sequence: Synthetic oligonucleotide"
ccuaagugggcaggaggggg

SEQ ID NO: 2429 - RNA, 20 nt, Artificial Sequence
  source: /note="Description of Artificial Sequence: Synthetic oligonucleotide"
cuaagugggcaggagggggc

SEQ ID NO: 2430 - RNA, 20 nt, Artificial Sequence
  source: /note="Description of Artificial Sequence: Synthetic oligonucleotide"
agggggcgggugccagguug

SEQ ID NO: 2431 - RNA, 20 nt, Artificial Sequence
  source: /note="Description of Artificial Sequence: Synthetic oligonucleotide"
gcgggugccagguugggggc

SEQ ID NO: 2432 - RNA, 20 nt, Artificial Sequence
  source: /note="Description of Artificial Sequence: Synthetic oligonucleotide"
cgggugccagguugggggcg

SEQ ID NO: 2433 - RNA, 20 nt, Artificial Sequence
  source: /note="Description of Artificial Sequence: Synthetic oligonucleotide"
ccagcuguuccuugacaguu

SEQ ID NO: 2434 - RNA, 20 nt, Artificial Sequence
  source: /note="Description of Artificial Sequence: Synthetic oligonucleotide"
ccaacugucaaggaacagcu

SEQ ID NO: 2435 - RNA, 20 nt, Artificial Sequence
  source: /note="Description of Artificial Sequence: Synthetic oligonucleotide"
caacugucaaggaacagcug

SEQ ID NO: 2436 - RNA, 20 nt, Artificial Sequence
  source: /note="Description of Artificial Sequence: Synthetic oligonucleotide"
caaucggagagagaagcagg

SEQ ID NO: 2437 - RNA, 20 nt, Artificial Sequence
  source: /note="Description of Artificial Sequence: Synthetic oligonucleotide"
aauguguugccggccuugug

SEQ ID NO: 2438 - RNA, 20 nt, Artificial Sequence
  source: /note="Description of Artificial Sequence: Synthetic oligonucleotide"
cagaccuagggaaccccaca

SEQ ID NO: 2439 - RNA, 20 nt, Artificial Sequence
  source: /note="Description of Artificial Sequence: Synthetic oligonucleotide"
gguucccuaggucugcggaa

SEQ ID NO: 2440 - RNA, 20 nt, Artificial Sequence
  source: /note="Description of Artificial Sequence: Synthetic oligonucleotide"
acucggagauggagacuuuc

SEQ ID NO: 2441 - RNA, 20 nt, Artificial Sequence
  source: /note="Description of Artificial Sequence: Synthetic oligonucleotide"
acccugccccauucccuuuc

SEQ ID NO: 2442 - RNA, 20 nt, Artificial Sequence
  source: /note="Description of Artificial Sequence: Synthetic oligonucleotide"
auggggcaggguccuagggc

SEQ ID NO: 2443 - RNA, 20 nt, Artificial Sequence
  source: /note="Description of Artificial Sequence: Synthetic oligonucleotide"
aaaacucuuaagagccccga

SEQ ID NO: 2444 - RNA, 20 nt, Artificial Sequence
  source: /note="Description of Artificial Sequence: Synthetic oligonucleotide"
aagaguuuugacguuguuua

SEQ ID NO: 2445 - RNA, 20 nt, Artificial Sequence
  source: /note="Description of Artificial Sequence: Synthetic oligonucleotide"
agaguuuugacguuguuuaa

SEQ ID NO: 2446 - RNA, 20 nt, Artificial Sequence
  source: /note="Description of Artificial Sequence: Synthetic oligonucleotide"
aguuuugacguuguuuaagg

SEQ ID NO: 2447 - RNA, 20 nt, Artificial Sequence
  source: /note="Description of Artificial Sequence: Synthetic oligonucleotide"
uguuuaagggggucugagug

SEQ ID NO: 2448 - RNA, 20 nt, Artificial Sequence
  source: /note="Description of Artificial Sequence: Synthetic oligonucleotide"
ggacaucucuaucccuagga

SEQ ID NO: 2449 - RNA, 20 nt, Artificial Sequence
  source: /note="Description of Artificial Sequence: Synthetic oligonucleotide"
gagauguccggggacugggc

SEQ ID NO: 2450 - RNA, 20 nt, Artificial Sequence
  source: /note="Description of Artificial Sequence: Synthetic oligonucleotide"
guccggggacugggcugggg

SEQ ID NO: 2451 - RNA, 20 nt, Artificial Sequence
  source: /note="Description of Artificial Sequence: Synthetic oligonucleotide"
ugggcuggggcggcgguuag

SEQ ID NO: 2452 - RNA, 20 nt, Artificial Sequence
  source: /note="Description of Artificial Sequence: Synthetic oligonucleotide"
gggcggcgguuagaggccgc

SEQ ID NO: 2453 - RNA, 20 nt, Artificial Sequence
  source: /note="Description of Artificial Sequence: Synthetic oligonucleotide"
cacccacgcugggcgcccag

SEQ ID NO: 2454 - RNA, 20 nt, Artificial Sequence
  source: /note="Description of Artificial Sequence: Synthetic oligonucleotide"
aggccgcugggcgcccagcg

SEQ ID NO: 2455 - RNA, 20 nt, Artificial Sequence
  source: /note="Description of Artificial Sequence: Synthetic oligonucleotide"
ggccgcugggcgcccagcgu

SEQ ID NO: 2456 - RNA, 20 nt, Artificial Sequence
  source: /note="Description of Artificial Sequence: Synthetic oligonucleotide"
gggcggacggcugcagcugc

SEQ ID NO: 2457 - RNA, 20 nt, Artificial Sequence
  source: /note="Description of Artificial Sequence: Synthetic oligonucleotide"
gucugggcccugagggcgga

SEQ ID NO: 2458 - RNA, 20 nt, Artificial Sequence
  source: /note="Description of Artificial Sequence: Synthetic oligonucleotide"
guucgucugggcccugaggg

SEQ ID NO: 2459 - RNA, 20 nt, Artificial Sequence
  source: /note="Description of Artificial Sequence: Synthetic oligonucleotide"
cucggcgcucggcacucggc

SEQ ID NO: 2460 - RNA, 20 nt, Artificial Sequence
  source: /note="Description of Artificial Sequence: Synthetic oligonucleotide"
ggcacucggcaggccaaccu

SEQ ID NO: 2461 - RNA, 20 nt, Artificial Sequence
  source: /note="Description of Artificial Sequence: Synthetic oligonucleotide"
ggcgcucagcugcucccgcc

SEQ ID NO: 2462 - RNA, 20 nt, Artificial Sequence
  source: /note="Description of Artificial Sequence: Synthetic oligonucleotide"
ggaggcggccaucuuggcuc

SEQ ID NO: 2463 - RNA, 20 nt, Artificial Sequence
  source: /note="Description of Artificial Sequence: Synthetic oligonucleotide"
ucggcacugggcgguggagg

SEQ ID NO: 2464 - RNA, 20 nt, Artificial Sequence
  source: /note="Description of Artificial Sequence: Synthetic oligonucleotide"
cgcuuuugucacucggcacu

SEQ ID NO: 2465 - RNA, 20 nt, Artificial Sequence
  source: /note="Description of Artificial Sequence: Synthetic oligonucleotide"
ccagugccgagugacaaaag

SEQ ID NO: 2466 - RNA, 20 nt, Artificial Sequence
  source: /note="Description of Artificial Sequence: Synthetic oligonucleotide"
cugggcgggggcgcccccgc

SEQ ID NO: 2467 - RNA, 20 nt, Artificial Sequence
  source: /note="Description of Artificial Sequence: Synthetic oligonucleotide"
ugccgcggggcccgggcucg

SEQ ID NO: 2468 - RNA, 20 nt, Artificial Sequence
  source: /note="Description of Artificial Sequence: Synthetic oligonucleotide"
gccuugggcccgucccgcgg

SEQ ID NO: 2469 - RNA, 20 nt, Artificial Sequence
  source: /note="Description of Artificial Sequence: Synthetic oligonucleotide"
ggacgggcccaaggccgagc

SEQ ID NO: 2470 - RNA, 20 nt, Artificial Sequence
  source: /note="Description of Artificial Sequence: Synthetic oligonucleotide"
cgcgggcucuuaccgggcgc

SEQ ID NO: 2471 - RNA, 20 nt, Artificial Sequence
  source: /note="Description of Artificial Sequence: Synthetic oligonucleotide"
gcgcgggcucuuaccgggcg

SEQ ID NO: 2472 - RNA, 20 nt, Artificial Sequence
  source: /note="Description of Artificial Sequence: Synthetic oligonucleotide"
ccccacacccucccaagcgc

SEQ ID NO: 2473 - RNA, 20 nt, Artificial Sequence
  source: /note="Description of Artificial Sequence: Synthetic oligonucleotide"
cccgcgcuugggagggugug

SEQ ID NO: 2474 - RNA, 20 nt, Artificial Sequence
  source: /note="Description of Artificial Sequence: Synthetic oligonucleotide"
gcagacuggacggaaggcgu

SEQ ID NO: 2475 - RNA, 20 nt, Artificial Sequence
  source: /note="Description of Artificial Sequence: Synthetic oligonucleotide"
ggggggucccgcagacugga

SEQ ID NO: 2476 - RNA, 20 nt, Artificial Sequence
  source: /note="Description of Artificial Sequence: Synthetic oligonucleotide"
gaggggggggucccgcagac

SEQ ID NO: 2477 - RNA, 20 nt, Artificial Sequence
  source: /note="Description of Artificial Sequence: Synthetic oligonucleotide"
acuaaagggccugggggagg

SEQ ID NO: 2478 - RNA, 20 nt, Artificial Sequence
  source: /note="Description of Artificial Sequence: Synthetic oligonucleotide"
caacuaaagggccuggggga

SEQ ID NO: 2479 - RNA, 20 nt, Artificial Sequence
  source: /note="Description of Artificial Sequence: Synthetic oligonucleotide"
gcgggaccccccccuccccc

SEQ ID NO: 2480 - RNA, 20 nt, Artificial Sequence
  source: /note="Description of Artificial Sequence: Synthetic oligonucleotide"
acaacuaaagggccuggggg

SEQ ID NO: 2481 - RNA, 20 nt, Artificial Sequence
  source: /note="Description of Artificial Sequence: Synthetic oligonucleotide"
cccacacaacuaaagggccu

SEQ ID NO: 2482 - RNA, 20 nt, Artificial Sequence
  source: /note="Description of Artificial Sequence: Synthetic oligonucleotide"
gcccacacaacuaaagggcc

SEQ ID NO: 2483 - RNA, 20 nt, Artificial Sequence
  source: /note="Description of Artificial Sequence: Synthetic oligonucleotide"
cccugggcccacacaacuaa

SEQ ID NO: 2484 - RNA, 20 nt, Artificial Sequence
  source: /note="Description of Artificial Sequence: Synthetic oligonucleotide"
ccccaggcccuuuaguugug

SEQ ID NO: 2485 - RNA, 20 nt, Artificial Sequence
  source: /note="Description of Artificial Sequence: Synthetic oligonucleotide"
cccaggcccuuuaguugugu

SEQ ID NO: 2486 - RNA, 20 nt, Artificial Sequence
  source: /note="Description of Artificial Sequence: Synthetic oligonucleotide"
ccuuuaguugugugggccca

SEQ ID NO: 2487 - RNA, 20 nt, Artificial Sequence
  source: /note="Description of Artificial Sequence: Synthetic oligonucleotide"
acccugcgagcggcgacaga

SEQ ID NO: 2488 - RNA, 20 nt, Artificial Sequence
  source: /note="Description of Artificial Sequence: Synthetic oligonucleotide"
gccuucugucgccgcucgca

SEQ ID NO: 2489 - RNA, 20 nt, Artificial Sequence
  source: /note="Description of Artificial Sequence: Synthetic oligonucleotide"
ggaggaguguuucugaggcc

SEQ ID NO: 2490 - RNA, 20 nt, Artificial Sequence
  source: /note="Description of Artificial Sequence: Synthetic oligonucleotide"
gcggcggaggaguguuucug

SEQ ID NO: 2491 - RNA, 20 nt, Artificial Sequence
  source: /note="Description of Artificial Sequence: Synthetic oligonucleotide"
cggggcuccaaagggggcaa

SEQ ID NO: 2492 - RNA, 20 nt, Artificial Sequence
  source: /note="Description of Artificial Sequence: Synthetic oligonucleotide"
cgcucccggggcuccaaagg

SEQ ID NO: 2493 - RNA, 20 nt, Artificial Sequence
  source: /note="Description of Artificial Sequence: Synthetic oligonucleotide"
cuugcccccuuuggagcccc

SEQ ID NO: 2494 - RNA, 20 nt, Artificial Sequence
  source: /note="Description of Artificial Sequence: Synthetic oligonucleotide"
agcgucccuugccacgguuc

SEQ ID NO: 2495 - RNA, 20 nt, Artificial Sequence
  source: /note="Description of Artificial Sequence: Synthetic oligonucleotide"
aggacuuugucaaagucucc

SEQ ID NO: 2496 - RNA, 20 nt, Artificial Sequence
  source: /note="Description of Artificial Sequence: Synthetic oligonucleotide"
gaggacuuugucaaagucuc

SEQ ID NO: 2497 - RNA, 20 nt, Artificial Sequence
  source: /note="Description of Artificial Sequence: Synthetic oligonucleotide"
ggagacuuugacaaaguccu

SEQ ID NO: 2498 - RNA, 20 nt, Artificial Sequence
  source: /note="Description of Artificial Sequence: Synthetic oligonucleotide"
gucucgcagaagcaaagagu

SEQ ID NO: 2499 - RNA, 20 nt, Artificial Sequence
  source: /note="Description of Artificial Sequence: Synthetic oligonucleotide"
cagugggauguaacggggca

SEQ ID NO: 2500 - RNA, 20 nt, Artificial Sequence
  source: /note="Description of Artificial Sequence: Synthetic oligonucleotide"
ucagugggauguaacggggc

SEQ ID NO: 2501 - RNA, 20 nt, Artificial Sequence
  source: /note="Description of Artificial Sequence: Synthetic oligonucleotide"
aggcguucagugggauguaa

SEQ ID NO: 2502 - RNA, 20 nt, Artificial Sequence
  source: /note="Description of Artificial Sequence: Synthetic oligonucleotide"
gggccuuggaggcguucagu

SEQ ID NO: 2503 - RNA, 20 nt, Artificial Sequence
  source: /note="Description of Artificial Sequence: Synthetic oligonucleotide"
ggggccuuggaggcguucag

SEQ ID NO: 2504 - RNA, 20 nt, Artificial Sequence
  source: /note="Description of Artificial Sequence: Synthetic oligonucleotide"
caucccacugaacgccucca

SEQ ID NO: 2505 - RNA, 20 nt, Artificial Sequence
  source: /note="Description of Artificial Sequence: Synthetic oligonucleotide"
uucacgucuaguuguucaaa

SEQ ID NO: 2506 - RNA, 20 nt, Artificial Sequence
  source: /note="Description of Artificial Sequence: Synthetic oligonucleotide"
uagacgugaaaauucacccu

SEQ ID NO: 2507 - RNA, 20 nt, Artificial Sequence
  source: /note="Description of Artificial Sequence: Synthetic oligonucleotide"
ggugaggaguguguggcaga

SEQ ID NO: 2508 - RNA, 20 nt, Artificial Sequence
  source: /note="Description of Artificial Sequence: Synthetic oligonucleotide"
gcccgcagcaucccugggug

SEQ ID NO: 2509 - RNA, 20 nt, Artificial Sequence
  source: /note="Description of Artificial Sequence: Synthetic oligonucleotide"
cuccucacccagggaugcug

SEQ ID NO: 2510 - RNA, 20 nt, Artificial Sequence
  source: /note="Description of Artificial Sequence: Synthetic oligonucleotide"
caccuacagcuaucugacuu

SEQ ID NO: 2511 - RNA, 20 nt, Artificial Sequence
  source: /note="Description of Artificial Sequence: Synthetic oligonucleotide"
gcugggcccuaaguggggua

SEQ ID NO: 2512 - RNA, 20 nt, Artificial Sequence
  source: /note="Description of Artificial Sequence: Synthetic oligonucleotide"
gcagacaccuuaccccacuu

SEQ ID NO: 2513 - RNA, 20 nt, Artificial Sequence
  source: /note="Description of Artificial Sequence: Synthetic oligonucleotide"
cagacaccuuaccccacuua

SEQ ID NO: 2514 - RNA, 20 nt, Artificial Sequence
  source: /note="Description of Artificial Sequence: Synthetic oligonucleotide"
agacaaugggggaccagggg

SEQ ID NO: 2515 - RNA, 20 nt, Artificial Sequence
  source: /note="Description of Artificial Sequence: Synthetic oligonucleotide"
gcagagacaaugggggacca

SEQ ID NO: 2516 - RNA, 20 nt, Artificial Sequence
  source: /note="Description of Artificial Sequence: Synthetic oligonucleotide"
ugcagagacaaugggggacc

SEQ ID NO: 2517 - RNA, 20 nt, Artificial Sequence
  source: /note="Description of Artificial Sequence: Synthetic oligonucleotide"
uccaccagacaagacagcug

SEQ ID NO: 2518 - RNA, 20 nt, Artificial Sequence
  source: /note="Description of Artificial Sequence: Synthetic oligonucleotide"
cuccaccagacaagacagcu

SEQ ID NO: 2519 - RNA, 20 nt, Artificial Sequence
  source: /note="Description of Artificial Sequence: Synthetic oligonucleotide"
gcagccccagcugucuuguc

SEQ ID NO: 2520 - RNA, 20 nt, Artificial Sequence
  source: /note="Description of Artificial Sequence: Synthetic oligonucleotide"
guggcuucacagcacuugug

SEQ ID NO: 2521 - RNA, 20 nt, Artificial Sequence
  source: /note="Description of Artificial Sequence: Synthetic oligonucleotide"
gggaauucaacacaacacca

SEQ ID NO: 2522 - RNA, 20 nt, Artificial Sequence
  source: /note="Description of Artificial Sequence: Synthetic oligonucleotide"
gucugccugucucgagggug

SEQ ID NO: 2523 - RNA, 20 nt, Artificial Sequence
  source: /note="Description of Artificial Sequence: Synthetic oligonucleotide"
cucugggcagaacuugugag

SEQ ID NO: 2524 - RNA, 20 nt, Artificial Sequence
  source: /note="Description of Artificial Sequence: Synthetic oligonucleotide"
aucuuuucuuugagaucccc

SEQ ID NO: 2525 - RNA, 20 nt, Artificial Sequence
  source: /note="Description of Artificial Sequence: Synthetic oligonucleotide"
ucuuuucuuugagauccccu

SEQ ID NO: 2526 - RNA, 20 nt, Artificial Sequence
  source: /note="Description of Artificial Sequence: Synthetic oligonucleotide"
uucuuugagauccccuggga

SEQ ID NO: 2527 - RNA, 20 nt, Artificial Sequence
  source: /note="Description of Artificial Sequence: Synthetic oligonucleotide"
ucuuugagauccccugggau

SEQ ID NO: 2528 - RNA, 20 nt, Artificial Sequence
  source: /note="Description of Artificial Sequence: Synthetic oligonucleotide"
gauccccugggaugggaguu

SEQ ID NO: 2529 - RNA, 20 nt, Artificial Sequence
  source: /note="Description of Artificial Sequence: Synthetic oligonucleotide"
acuacagcauggacaggucu

SEQ ID NO: 2530 - RNA, 20 nt, Artificial Sequence
  source: /note="Description of Artificial Sequence: Synthetic oligonucleotide"
ccacacacuacagcauggac

SEQ ID NO: 2531 - RNA, 20 nt, Artificial Sequence
  source: /note="Description of Artificial Sequence: Synthetic oligonucleotide"
ugcuuccacacacuacagca

SEQ ID NO: 2532 - RNA, 20 nt, Artificial Sequence
  source: /note="Description of Artificial Sequence: Synthetic oligonucleotide"
ccuguccaugcuguagugug

SEQ ID NO: 2533 - RNA, 20 nt, Artificial Sequence
  source: /note="Description of Artificial Sequence: Synthetic oligonucleotide"
cugcuggcgucugcugucag

SEQ ID NO: 2534 - RNA, 20 nt, Artificial Sequence
  source: /note="Description of Artificial Sequence: Synthetic oligonucleotide"
ucagugucccugcacuggac

SEQ ID NO: 2535 - RNA, 20 nt, Artificial Sequence
  source: /note="Description of Artificial Sequence: Synthetic oligonucleotide"
ucccugcacuggacuggugc

SEQ ID NO: 2536 - RNA, 20 nt, Artificial Sequence
  source: /note="Description of Artificial Sequence: Synthetic oligonucleotide"
cccugcacuggacuggugcu

SEQ ID NO: 2537 - RNA, 20 nt, Artificial Sequence
  source: /note="Description of Artificial Sequence: Synthetic oligonucleotide"
cugcacuggacuggugcugg

SEQ ID NO: 2538 - RNA, 20 nt, Artificial Sequence
  source: /note="Description of Artificial Sequence: Synthetic oligonucleotide"
ugguggaaccucagcuuucc

SEQ ID NO: 2539 - RNA, 20 nt, Artificial Sequence
  source: /note="Description of Artificial Sequence: Synthetic oligonucleotide"
gguggaaccucagcuuuccu

SEQ ID NO: 2540 - RNA, 20 nt, Artificial Sequence
  source: /note="Description of Artificial Sequence: Synthetic oligonucleotide"
guggaaccucagcuuuccug

SEQ ID NO: 2541 - RNA, 20 nt, Artificial Sequence
  source: /note="Description of Artificial Sequence: Synthetic oligonucleotide"
gacaucaaggauaaggaaga

SEQ ID NO: 2542 - RNA, 20 nt, Artificial Sequence
  source: /note="Description of Artificial Sequence: Synthetic oligonucleotide"
gaaggccaucuucuuaguuc

SEQ ID NO: 2543 - RNA, 20 nt, Artificial Sequence
  source: /note="Description of Artificial Sequence: Synthetic oligonucleotide"
aaggccaucuucuuaguucu

SEQ ID NO: 2544 - RNA, 20 nt, Artificial Sequence
  source: /note="Description of Artificial Sequence: Synthetic oligonucleotide"
gcucagcccagacaaauuuc

SEQ ID NO: 2545 - RNA, 20 nt, Artificial Sequence
  source: /note="Description of Artificial Sequence: Synthetic oligonucleotide"
uagacagccugaaauuuguc

SEQ ID NO: 2546 - RNA, 20 nt, Artificial Sequence
  source: /note="Description of Artificial Sequence: Synthetic oligonucleotide"
agacagccugaaauuugucu

SEQ ID NO: 2547 - RNA, 20 nt, Artificial Sequence
  source: /note="Description of Artificial Sequence: Synthetic oligonucleotide"
agaacccaggccuguggguu

SEQ ID NO: 2548 - RNA, 20 nt, Artificial Sequence
  source: /note="Description of Artificial Sequence: Synthetic oligonucleotide"
agccugucuccccaacccac

SEQ ID NO: 2549 - RNA, 20 nt, Artificial Sequence
  source: /note="Description of Artificial Sequence: Synthetic oligonucleotide"
cgcaaugguggccauggacu

SEQ ID NO: 2550 - RNA, 20 nt, Artificial Sequence
  source: /note="Description of Artificial Sequence: Synthetic oligonucleotide"
aggcucuucuuagggagcga

SEQ ID NO: 2551 - RNA, 20 nt, Artificial Sequence
  source: /note="Description of Artificial Sequence: Synthetic oligonucleotide"
accucaagggugaguggccc

SEQ ID NO: 2552 - RNA, 20 nt, Artificial Sequence
  source: /note="Description of Artificial Sequence: Synthetic oligonucleotide"
gcauccccugccaugccacc

SEQ ID NO: 2553 - RNA, 20 nt, Artificial Sequence
  source: /note="Description of Artificial Sequence: Synthetic oligonucleotide"
guggcccagguggcauggca

SEQ ID NO: 2554 - RNA, 20 nt, Artificial Sequence
  source: /note="Description of Artificial Sequence: Synthetic oligonucleotide"
uggcccagguggcauggcag

SEQ ID NO: 2555 - RNA, 20 nt, Artificial Sequence
  source: /note="Description of Artificial Sequence: Synthetic oligonucleotide"
uccugugaguguaaccagcc

SEQ ID NO: 2556 - RNA, 20 nt, Artificial Sequence
  source: /note="Description of Artificial Sequence: Synthetic oligonucleotide"
gccaggcugguuacacucac

SEQ ID NO: 2557 - RNA, 20 nt, Artificial Sequence
  source: /note="Description of Artificial Sequence: Synthetic oligonucleotide"
caggagcacucucgugccuu

SEQ ID NO: 2558 - RNA, 20 nt, Artificial Sequence
  source: /note="Description of Artificial Sequence: Synthetic oligonucleotide"
cgugccuugggguuaaugug

SEQ ID NO: 2559 - RNA, 20 nt, Artificial Sequence
  source: /note="Description of Artificial Sequence: Synthetic oligonucleotide"
ugggguuaauguggggccca

SEQ ID NO: 2560 - RNA, 20 nt, Artificial Sequence
  source: /note="Description of Artificial Sequence: Synthetic oligonucleotide"
ggugccagagggaaaacugc

SEQ ID NO: 2561 - RNA, 20 nt, Artificial Sequence
  source: /note="Description of Artificial Sequence: Synthetic oligonucleotide"
uggugccucaaggugccaga

SEQ ID NO: 2562 - RNA, 20 nt, Artificial Sequence
  source: /note="Description of Artificial Sequence: Synthetic oligonucleotide"
ucuggcaccuugaggcacca

SEQ ID NO: 2563 - RNA, 20 nt, Artificial Sequence
  source: /note="Description of Artificial Sequence: Synthetic oligonucleotide"
cucuugaacuucuacugucc

SEQ ID NO: 2564 - RNA, 20 nt, Artificial Sequence
  source: /note="Description of Artificial Sequence: Synthetic oligonucleotide"
cccugagcugcacccucacg

SEQ ID NO: 2565 - RNA, 20 nt, Artificial Sequence
  source: /note="Description of Artificial Sequence: Synthetic oligonucleotide"
ugcugucccucgccccguga

SEQ ID NO: 2566 - RNA, 20 nt, Artificial Sequence
  source: /note="Description of Artificial Sequence: Synthetic oligonucleotide"
agcugcacccucacggggcg

SEQ ID NO: 2567 - RNA, 20 nt, Artificial Sequence
  source: /note="Description of Artificial Sequence: Synthetic oligonucleotide"
accaccacacccacugcuuc

SEQ ID NO: 2568 - RNA, 20 nt, Artificial Sequence
  source: /note="Description of Artificial Sequence: Synthetic oligonucleotide"
ggacagcauccagaagcagu

SEQ ID NO: 2569 - RNA, 20 nt, Artificial Sequence
  source: /note="Description of Artificial Sequence: Synthetic oligonucleotide"
gcauccagaagcagugggug

SEQ ID NO: 2570 - RNA, 20 nt, Artificial Sequence
  source: /note="Description of Artificial Sequence: Synthetic oligonucleotide"
cugggucugaguaugagcuc

SEQ ID NO: 2571 - RNA, 20 nt, Artificial Sequence
  source: /note="Description of Artificial Sequence: Synthetic oligonucleotide"
ugaauggcccucaagagcaa

SEQ ID NO: 2572 - RNA, 20 nt, Artificial Sequence
  source: /note="Description of Artificial Sequence: Synthetic oligonucleotide"
gggcaccccguaggccugaa

SEQ ID NO: 2573 - RNA, 20 nt, Artificial Sequence
  source: /note="Description of Artificial Sequence: Synthetic oligonucleotide"
ccuucugucauccagccagu

SEQ ID NO: 2574 - RNA, 20 nt, Artificial Sequence
  source: /note="Description of Artificial Sequence: Synthetic oligonucleotide"
gugaaaggugucccacuggc

SEQ ID NO: 2575 - RNA, 20 nt, Artificial Sequence
  source: /note="Description of Artificial Sequence: Synthetic oligonucleotide"
ccacuggcuggaugacagaa

SEQ ID NO: 2576 - RNA, 20 nt, Artificial Sequence
  source: /note="Description of Artificial Sequence: Synthetic oligonucleotide"
gugagugggacucucagggg

SEQ ID NO: 2577 - RNA, 20 nt, Artificial Sequence
  source: /note="Description of Artificial Sequence: Synthetic oligonucleotide"
gacucucaggggaggagaag

SEQ ID NO: 2578 - RNA, 20 nt, Artificial Sequence
  source: /note="Description of Artificial Sequence: Synthetic oligonucleotide"
gaagcgggagagcugggccg

SEQ ID NO: 2579 - RNA, 20 nt, Artificial Sequence
  source: /note="Description of Artificial Sequence: Synthetic oligonucleotide"
aacacagaggccgggagagc

SEQ ID NO: 2580 - RNA, 20 nt, Artificial Sequence
  source: /note="Description of Artificial Sequence: Synthetic oligonucleotide"
ugggcugaagggcaacacag

SEQ ID NO: 2581 - RNA, 20 nt, Artificial Sequence
  source: /note="Description of Artificial Sequence: Synthetic oligonucleotide"
cucgcagguggucaggcucu

SEQ ID NO: 2582 - RNA, 20 nt, Artificial Sequence
  source: /note="Description of Artificial Sequence: Synthetic oligonucleotide"
cugaccaccugcgaggucug

SEQ ID NO: 2583 - RNA, 20 nt, Artificial Sequence
  source: /note="Description of Artificial Sequence: Synthetic oligonucleotide"
ugccugcuuugagacccgaa

SEQ ID NO: 2584 - RNA, 20 nt, Artificial Sequence
  source: /note="Description of Artificial Sequence: Synthetic oligonucleotide"
cguggcuggacaggcccuuu

SEQ ID NO: 2585 - RNA, 20 nt, Artificial Sequence
  source: /note="Description of Artificial Sequence: Synthetic oligonucleotide"
guggcagagucggaaagcag

SEQ ID NO: 2586 - RNA, 20 nt, Artificial Sequence
  source: /note="Description of Artificial Sequence: Synthetic oligonucleotide"
agcucguagaggaggucgau

SEQ ID NO: 2587 - RNA, 20 nt, Artificial Sequence
  source: /note="Description of Artificial Sequence: Synthetic oligonucleotide"
aagcucguagaggaggucga

SEQ ID NO: 2588 - RNA, 20 nt, Artificial Sequence
  source: /note="Description of Artificial Sequence: Synthetic oligonucleotide"
gugagcuggacuucuuagcc

SEQ ID NO: 2589 - RNA, 20 nt, Artificial Sequence
  source: /note="Description of Artificial Sequence: Synthetic oligonucleotide"
uaagaaguccagcucacuga

SEQ ID NO: 2590 - RNA, 20 nt, Artificial Sequence
  source: /note="Description of Artificial Sequence: Synthetic oligonucleotide"
gaaguccagcucacugaagg

SEQ ID NO: 2591 - RNA, 20 nt, Artificial Sequence
  source: /note="Description of Artificial Sequence: Synthetic oligonucleotide"
guccagcucacugaaggagg

SEQ ID NO: 2592 - RNA, 20 nt, Artificial Sequence
  source: /note="Description of Artificial Sequence: Synthetic oligonucleotide"
ucacugaaggagguggucgc

SEQ ID NO: 2593 - RNA, 20 nt, Artificial Sequence
  source: /note="Description of Artificial Sequence: Synthetic oligonucleotide"
cacugaaggagguggucgcc

SEQ ID NO: 2594 - RNA, 20 nt, Artificial Sequence
  source: /note="Description of Artificial Sequence: Synthetic oligonucleotide"
gcugagcaagccgggccggg

SEQ ID NO: 2595 - RNA, 20 nt, Artificial Sequence
  source: /note="Description of Artificial Sequence: Synthetic oligonucleotide"
ggcugagcaagccgggccgg

SEQ ID NO: 2596 - RNA, 20 nt, Artificial Sequence
  source: /note="Description of Artificial Sequence: Synthetic oligonucleotide"
aggcugagcaagccgggccg

SEQ ID NO: 2597 - RNA, 20 nt, Artificial Sequence
  source: /note="Description of Artificial Sequence: Synthetic oligonucleotide"
caggcugagcaagccgggcc

SEQ ID NO: 2598 - RNA, 20 nt, Artificial Sequence
  source: /note="Description of Artificial Sequence: Synthetic oligonucleotide"
gggcauccaagggcuuggcc

SEQ ID NO: 2599 - RNA, 20 nt, Artificial Sequence
  source: /note="Description of Artificial Sequence: Synthetic oligonucleotide"
gcucagccuggccaagcccu

SEQ ID NO: 2600 - RNA, 20 nt, Artificial Sequence
  source: /note="Description of Artificial Sequence: Synthetic oligonucleotide"
uugacagcaggggcauccaa

SEQ ID NO: 2601 - RNA, 20 nt, Artificial Sequence
  source: /note="Description of Artificial Sequence: Synthetic oligonucleotide"
gaagccgggaggcgacuuga

SEQ ID NO: 2602 - RNA, 20 nt, Artificial Sequence
  source: /note="Description of Artificial Sequence: Synthetic oligonucleotide"
aaagccaucaagucgccucc

SEQ ID NO: 2603 - RNA, 20 nt, Artificial Sequence
  source: /note="Description of Artificial Sequence: Synthetic oligonucleotide"
cccuuggccgagaagccggg

SEQ ID NO: 2604 - RNA, 20 nt, Artificial Sequence
  source: /note="Description of Artificial Sequence: Synthetic oligonucleotide"
caggcccuuggccgagaagc

SEQ ID NO: 2605 - RNA, 20 nt, Artificial Sequence
  source: /note="Description of Artificial Sequence: Synthetic oligonucleotide"
ccucccggcuucucggccaa

SEQ ID NO: 2606 - RNA, 20 nt, Artificial Sequence
  source: /note="Description of Artificial Sequence: Synthetic oligonucleotide"
ggaguggagagcugggcggg

SEQ ID NO: 2607 - RNA, 20 nt, Artificial Sequence
  source: /note="Description of Artificial Sequence: Synthetic oligonucleotide"
uuuuugaggaguggagagcu

SEQ ID NO: 2608 - RNA, 20 nt, Artificial Sequence
  source: /note="Description of Artificial Sequence: Synthetic oligonucleotide"
cuuuuugaggaguggagagc

SEQ ID NO: 2609 - RNA, 20 nt, Artificial Sequence
  source: /note="Description of Artificial Sequence: Synthetic oligonucleotide"
agggguaggggagcccgcca

SEQ ID NO: 2610 - RNA, 20 nt, Artificial Sequence
  source: /note="Description of Artificial Sequence: Synthetic oligonucleotide"
uagggguaggggagcccgcc

SEQ ID NO: 2611 - RNA, 20 nt, Artificial Sequence
  source: /note="Description of Artificial Sequence: Synthetic oligonucleotide"
ccuuuggggaggccggccgg

SEQ ID NO: 2612 - RNA, 20 nt, Artificial Sequence
  source: /note="Description of Artificial Sequence: Synthetic oligonucleotide"
cccccggccggccuccccaa

SEQ ID NO: 2613 - RNA, 20 nt, Artificial Sequence
  source: /note="Description of Artificial Sequence: Synthetic oligonucleotide"
ggcacaguggccucagucug

SEQ ID NO: 2614 - RNA, 20 nt, Artificial Sequence
  source: /note="Description of Artificial Sequence: Synthetic oligonucleotide"
cccacacucacugagguuca

SEQ ID NO: 2615 - RNA, 20 nt, Artificial Sequence
  source: /note="Description of Artificial Sequence: Synthetic oligonucleotide"
cccuugaaccucagugagug

SEQ ID NO: 2616 - RNA, 20 nt, Artificial Sequence
  source: /note="Description of Artificial Sequence: Synthetic oligonucleotide"
ccuugaaccucagugagugu

SEQ ID NO: 2617 - RNA, 20 nt, Artificial Sequence
  source: /note="Description of Artificial Sequence: Synthetic oligonucleotide"
gugugggucccaagagccga

SEQ ID NO: 2618 - RNA, 20 nt, Artificial Sequence
  source: /note="Description of Artificial Sequence: Synthetic oligonucleotide"
gggagguucuggcgcuggga

SEQ ID NO: 2619 - RNA, 20 nt, Artificial Sequence
  source: /note="Description of Artificial Sequence: Synthetic oligonucleotide"
ggagggucgggaccucaggu

SEQ ID NO: 2620 - RNA, 20 nt, Artificial Sequence
  source: /note="Description of Artificial Sequence: Synthetic oligonucleotide"
ucagguugggcuguagccca

SEQ ID NO: 2621 - RNA, 20 nt, Artificial Sequence
  source: /note="Description of Artificial Sequence: Synthetic oligonucleotide"
uugggcuguagcccagggac

SEQ ID NO: 2622 - RNA, 20 nt, Artificial Sequence
  source: /note="Description of Artificial Sequence: Synthetic oligonucleotide"
aagccucugcaucuccuuuu

SEQ ID NO: 2623 - RNA, 20 nt, Artificial Sequence
  source: /note="Description of Artificial Sequence: Synthetic oligonucleotide"
ggaagaucagcaaaguaaag

SEQ ID NO: 2624 - RNA, 20 nt, Artificial Sequence
  source: /note="Description of Artificial Sequence: Synthetic oligonucleotide"
ucagccgcagugaggcuuuc

SEQ ID NO: 2625 - RNA, 20 nt, Artificial Sequence
  source: /note="Description of Artificial Sequence: Synthetic oligonucleotide"
cugcggcugaugagccugcc

SEQ ID NO: 2626 - RNA, 20 nt, Artificial Sequence
  source: /note="Description of Artificial Sequence: Synthetic oligonucleotide"
guggcgagcaugacccuggc

SEQ ID NO: 2627 - RNA, 20 nt, Artificial Sequence
  source: /note="Description of Artificial Sequence: Synthetic oligonucleotide"
cagggucaugcucgccacug

SEQ ID NO: 2628 - RNA, 20 nt, Artificial Sequence
  source: /note="Description of Artificial Sequence: Synthetic oligonucleotide"
agggucaugcucgccacuga

SEQ ID NO: 2629 - RNA, 20 nt, Artificial Sequence
  source: /note="Description of Artificial Sequence: Synthetic oligonucleotide"
gggucaugcucgccacugag

SEQ ID NO: 2630 - RNA, 20 nt, Artificial Sequence
  source: /note="Description of Artificial Sequence: Synthetic oligonucleotide"
agccaagagcugccccucag

SEQ ID NO: 2631 - RNA, 20 nt, Artificial Sequence
  source: /note="Description of Artificial Sequence: Synthetic oligonucleotide"
cuuucucugggccugugggu

SEQ ID NO: 2632 - RNA, 20 nt, Artificial Sequence
  source: /note="Description of Artificial Sequence: Synthetic oligonucleotide"
uuucucugggccugugggua

SEQ ID NO: 2633 - RNA, 20 nt, Artificial Sequence
  source: /note="Description of Artificial Sequence: Synthetic oligonucleotide"
uucucugggccuguggguag

SEQ ID NO: 2634 - RNA, 20 nt, Artificial Sequence
  source: /note="Description of Artificial Sequence: Synthetic oligonucleotide"
agugguaguuggaagcaucu

SEQ ID NO: 2635 - RNA, 20 nt, Artificial Sequence
  source: /note="Description of Artificial Sequence: Synthetic oligonucleotide"
ggaagcaucuuggauagaca

SEQ ID NO: 2636 - RNA, 20 nt, Artificial Sequence
  source: /note="Description of Artificial Sequence: Synthetic oligonucleotide"
auagacaggggaucaccuga

SEQ ID NO: 2637 - RNA, 20 nt, Artificial Sequence
  source: /note="Description of Artificial Sequence: Synthetic oligonucleotide"
ccucugcgugguggacagcc

SEQ ID NO: 2638 - RNA, 20 nt, Artificial Sequence
  source: /note="Description of Artificial Sequence: Synthetic oligonucleotide"
ccuggcuguccaccacgcag

SEQ ID NO: 2639 - RNA, 20 nt, Artificial Sequence
  source: /note="Description of Artificial Sequence: Synthetic oligonucleotide"
ggagguggggcuucaccggc

SEQ ID NO: 2640 - RNA, 20 nt, Artificial Sequence
  source: /note="Description of Artificial Sequence: Synthetic oligonucleotide"
ccggugaagccccaccuccu

SEQ ID NO: 2641 - RNA, 20 nt, Artificial Sequence
  source: /note="Description of Artificial Sequence: Synthetic oligonucleotide"
gccugugggcacggcaggca

SEQ ID NO: 2642 - RNA, 20 nt, Artificial Sequence
  source: /note="Description of Artificial Sequence: Synthetic oligonucleotide"
gguuugggaagaaacccucc

SEQ ID NO: 2643 - RNA, 20 nt, Artificial Sequence
  source: /note="Description of Artificial Sequence: Synthetic oligonucleotide"
acccuccaggugcagugagc

SEQ ID NO: 2644 - RNA, 20 nt, Artificial Sequence
  source: /note="Description of Artificial Sequence: Synthetic oligonucleotide"
caggcuuucccauaucuuug

SEQ ID NO: 2645 - RNA, 20 nt, Artificial Sequence
  source: /note="Description of Artificial Sequence: Synthetic oligonucleotide"
uuuguggacauuagagucug

SEQ ID NO: 2646 - RNA, 20 nt, Artificial Sequence
  source: /note="Description of Artificial Sequence: Synthetic oligonucleotide"
uagagucugggggugacccc

SEQ ID NO: 2647 - RNA, 20 nt, Artificial Sequence
  source: /note="Description of Artificial Sequence: Synthetic oligonucleotide"
uugggcagggggugagaccc

SEQ ID NO: 2648 - RNA, 20 nt, Artificial Sequence
  source: /note="Description of Artificial Sequence: Synthetic oligonucleotide"
ggggggcuccauugggcagg

SEQ ID NO: 2649 - RNA, 20 nt, Artificial Sequence
  source: /note="Description of Artificial Sequence: Synthetic oligonucleotide"
auggggggcuccauugggca

SEQ ID NO: 2650 - RNA, 20 nt, Artificial Sequence
  source: /note="Description of Artificial Sequence: Synthetic oligonucleotide"
aacauaaggugccaaauggg

SEQ ID NO: 2651 - RNA, 20 nt, Artificial Sequence
  source: /note="Description of Artificial Sequence: Synthetic oligonucleotide"
agggaacauaaggugccaaa

SEQ ID NO: 2652 - RNA, 20 nt, Artificial Sequence
  source: /note="Description of Artificial Sequence: Synthetic oligonucleotide"
cucaguggaagcaacuucaa

SEQ ID NO: 2653 - RNA, 20 nt, Artificial Sequence
  source: /note="Description of Artificial Sequence: Synthetic oligonucleotide"
cugagucugccgugcuucca

SEQ ID NO: 2654 - RNA, 20 nt, Artificial Sequence
  source: /note="Description of Artificial Sequence: Synthetic oligonucleotide"
ugagucugccgugcuuccag

SEQ ID NO: 2655 - RNA, 20 nt, Artificial Sequence
  source: /note="Description of Artificial Sequence: Synthetic oligonucleotide"
gccaagggcacaccugcuca

SEQ ID NO: 2656 - RNA, 20 nt, Artificial Sequence
  source: /note="Description of Artificial Sequence: Synthetic oligonucleotide"
cugcugggcucacgcagcca

SEQ ID NO: 2657 - RNA, 20 nt, Artificial Sequence
  source: /note="Description of Artificial Sequence: Synthetic oligonucleotide"
cugcuaugggagcuauuugg

SEQ ID NO: 2658 - RNA, 20 nt, Artificial Sequence
  source: /note="Description of Artificial Sequence: Synthetic oligonucleotide"
cccugcuaugggagcuauuu

SEQ ID NO: 2659 - RNA, 20 nt, Artificial Sequence
  source: /note="Description of Artificial Sequence: Synthetic oligonucleotide"
ucccauagcagggauccuag

SEQ ID NO: 2660 - RNA, 20 nt, Artificial Sequence
  source: /note="Description of Artificial Sequence: Synthetic oligonucleotide"
uagcagggauccuaggggag

SEQ ID NO: 2661 - RNA, 20 nt, Artificial Sequence
  source: /note="Description of Artificial Sequence: Synthetic oligonucleotide"
gauccuaggggagagggucu

SEQ ID NO: 2662 - RNA, 20 nt, Artificial Sequence
  source: /note="Description of Artificial Sequence: Synthetic oligonucleotide"
aguugggggguccaagacuc

SEQ ID NO: 2663 - RNA, 20 nt, Artificial Sequence
  source: /note="Description of Artificial Sequence: Synthetic oligonucleotide"
uggcugcucaggcaguuggg

SEQ ID NO: 2664 - RNA, 20 nt, Artificial Sequence
  source: /note="Description of Artificial Sequence: Synthetic oligonucleotide"
ggagggucuggugugauuuu

SEQ ID NO: 2665 - RNA, 20 nt, Artificial Sequence
  source: /note="Description of Artificial Sequence: Synthetic oligonucleotide"
gcccccaaggccggccaagg

SEQ ID NO: 2666 - RNA, 20 nt, Artificial Sequence
  source: /note="Description of Artificial Sequence: Synthetic oligonucleotide"
cccaaggccggccaaggugg

SEQ ID NO: 2667 - RNA, 20 nt, Artificial Sequence
  source: /note="Description of Artificial Sequence: Synthetic oligonucleotide"
caaaacacaggggggguuca

SEQ ID NO: 2668 - RNA, 20 nt, Artificial Sequence
  source: /note="Description of Artificial Sequence: Synthetic oligonucleotide"
gcggagacaaaacacagggg

SEQ ID NO: 2669 - RNA, 20 nt, Artificial Sequence
  source: /note="Description of Artificial Sequence: Synthetic oligonucleotide"
aagcugcggagacaaaacac

SEQ ID NO: 2670 - RNA, 20 nt, Artificial Sequence
  source: /note="Description of Artificial Sequence: Synthetic oligonucleotide"
uagugacgggggcagagagc

SEQ ID NO: 2671 - RNA, 20 nt, Artificial Sequence
  source: /note="Description of Artificial Sequence: Synthetic oligonucleotide"
gagcuggacugccagcugug

SEQ ID NO: 2672 - RNA, 20 nt, Artificial Sequence
  source: /note="Description of Artificial Sequence: Synthetic oligonucleotide"
acugccagcugugcggugcc

SEQ ID NO: 2673 - RNA, 20 nt, Artificial Sequence
  source: /note="Description of Artificial Sequence: Synthetic oligonucleotide"
gcccuugcgggucucaaacc

SEQ ID NO: 2674 - RNA, 20 nt, Artificial Sequence
  source: /note="Description of Artificial Sequence: Synthetic oligonucleotide"
gccugguuugagacccgcaa

SEQ ID NO: 2675 - RNA, 20 nt, Artificial Sequence
  source: /note="Description of Artificial Sequence: Synthetic oligonucleotide"
guggcuagacaggcccuugc

SEQ ID NO: 2676 - RNA, 20 nt, Artificial Sequence
  source: /note="Description of Artificial Sequence: Synthetic oligonucleotide"
ccgugcccaccugcgccacc

SEQ ID NO: 2677 - RNA, 20 nt, Artificial Sequence
  source: /note="Description of Artificial Sequence: Synthetic oligonucleotide"
ccaccugggcgucagcgauc

SEQ ID NO: 2678 - RNA, 20 nt, Artificial Sequence
  source: /note="Description of Artificial Sequence: Synthetic oligonucleotide"
cgucccuccugaugagcccg

SEQ ID NO: 2679 - RNA, 20 nt, Artificial Sequence
  source: /note="Description of Artificial Sequence: Synthetic oligonucleotide"
ugggccagggcgccgcgccu

SEQ ID NO: 2680 - RNA, 20 nt, Artificial Sequence
  source: /note="Description of Artificial Sequence: Synthetic oligonucleotide"
cggccgccccgggugggcca

SEQ ID NO: 2681 - RNA, 20 nt, Artificial Sequence
  source: /note="Description of Artificial Sequence: Synthetic oligonucleotide"
gcggccgccccgggugggcc

SEQ ID NO: 2682 - RNA, 20 nt, Artificial Sequence
  source: /note="Description of Artificial Sequence: Synthetic oligonucleotide"
gcggcgcccuggcccacccg

SEQ ID NO: 2683 - RNA, 20 nt, Artificial Sequence
  source: /note="Description of Artificial Sequence: Synthetic oligonucleotide"
aaggagagggccgcggaggu

SEQ ID NO: 2684 - RNA, 20 nt, Artificial Sequence
  source: /note="Description of Artificial Sequence: Synthetic oligonucleotide"
aagcaaggagagggccgcgg

SEQ ID NO: 2685 - RNA, 20 nt, Artificial Sequence
  source: /note="Description of Artificial Sequence: Synthetic oligonucleotide"
uucuuggccggcgguggggg

SEQ ID NO: 2686 - RNA, 20 nt, Artificial Sequence
  source: /note="Description of Artificial Sequence: Synthetic oligonucleotide"
ccuucuuggccggcgguggg

SEQ ID NO: 2687 - RNA, 20 nt, Artificial Sequence
  source: /note="Description of Artificial Sequence: Synthetic oligonucleotide"
gccuucuuggccggcggugg

SEQ ID NO: 2688 - RNA, 20 nt, Artificial Sequence
  source: /note="Description of Artificial Sequence: Synthetic oligonucleotide"
ggccuucuuggccggcggug

SEQ ID NO: 2689 - RNA, 20 nt, Artificial Sequence
  source: /note="Description of Artificial Sequence: Synthetic oligonucleotide"
uggccuucuuggccggcggu

SEQ ID NO: 2690 - RNA, 20 nt, Artificial Sequence
  source: /note="Description of Artificial Sequence: Synthetic oligonucleotide"
uuggccuucuuggccggcgg

SEQ ID NO: 2691 - RNA, 20 nt, Artificial Sequence
  source: /note="Description of Artificial Sequence: Synthetic oligonucleotide"
ccccccaccgccggccaaga

SEQ ID NO: 2692 - RNA, 20 nt, Artificial Sequence
  source: /note="Description of Artificial Sequence: Synthetic oligonucleotide"
guccugcuucccccaggggc

SEQ ID NO: 2693 - RNA, 20 nt, Artificial Sequence
  source: /note="Description of Artificial Sequence: Synthetic oligonucleotide"
gcggguauggccagccccug

SEQ ID NO: 2694 - RNA, 20 nt, Artificial Sequence
  source: /note="Description of Artificial Sequence: Synthetic oligonucleotide"
agagguccugcuucccccag

SEQ ID NO: 2695 - RNA, 20 nt, Artificial Sequence
  source: /note="Description of Artificial Sequence: Synthetic oligonucleotide"
cgagagguccugcuuccccc

SEQ ID NO: 2696 - RNA, 20 nt, Artificial Sequence
  source: /note="Description of Artificial Sequence: Synthetic oligonucleotide"
ccagaaaaugccggcggcug

SEQ ID NO: 2697 - RNA, 20 nt, Artificial Sequence
  source: /note="Description of Artificial Sequence: Synthetic oligonucleotide"
agaggcccagaaaaugccgg

SEQ ID NO: 2698 - RNA, 20 nt, Artificial Sequence
  source: /note="Description of Artificial Sequence: Synthetic oligonucleotide"
cauuuucugggccucugaug

SEQ ID NO: 2699 - RNA, 20 nt, Artificial Sequence
  source: /note="Description of Artificial Sequence: Synthetic oligonucleotide"
cuacagagguugagaggaga

SEQ ID NO: 2700 - RNA, 20 nt, Artificial Sequence
  source: /note="Description of Artificial Sequence: Synthetic oligonucleotide"
gcgggcccuggagccccucc

SEQ ID NO: 2701 - RNA, 20 nt, Artificial Sequence
  source: /note="Description of Artificial Sequence: Synthetic oligonucleotide"
ccuggagccccucccggggg

SEQ ID NO: 2702 - RNA, 20 nt, Artificial Sequence
  source: /note="Description of Artificial Sequence: Synthetic oligonucleotide"
uggagccccucccggggggg

SEQ ID NO: 2703 - RNA, 20 nt, Artificial Sequence
  source: /note="Description of Artificial Sequence: Synthetic oligonucleotide"
ugucuacucccugccccagc

SEQ ID NO: 2704 - RNA, 20 nt, Artificial Sequence
  source: /note="Description of Artificial Sequence: Synthetic oligonucleotide"
agggaguagacaggggcccu

SEQ ID NO: 2705 - RNA, 20 nt, Artificial Sequence
  source: /note="Description of Artificial Sequence: Synthetic oligonucleotide"
gcagaaccggcccacugcca

SEQ ID NO: 2706 - RNA, 20 nt, Artificial Sequence
  source: /note="Description of Artificial Sequence: Synthetic oligonucleotide"
uagacaggggcccuuggcag

SEQ ID NO: 2707 - RNA, 20 nt, Artificial Sequence
  source: /note="Description of Artificial Sequence: Synthetic oligonucleotide"
cccagagaucuuguuggcag

SEQ ID NO: 2708 - RNA, 20 nt, Artificial Sequence
  source: /note="Description of Artificial Sequence: Synthetic oligonucleotide"
ggcugcuaggcccucucucu

SEQ ID NO: 2709 - RNA, 20 nt, Artificial Sequence
  source: /note="Description of Artificial Sequence: Synthetic oligonucleotide"
uuggccuucauucucaggaa

SEQ ID NO: 2710 - RNA, 20 nt, Artificial Sequence
  source: /note="Description of Artificial Sequence: Synthetic oligonucleotide"
augacccuuccugagaauga

SEQ ID NO: 2711 - RNA, 20 nt, Artificial Sequence
  source: /note="Description of Artificial Sequence: Synthetic oligonucleotide"
cuuccugagaaugaaggcca

SEQ ID NO: 2712 - RNA, 20 nt, Artificial Sequence
  source: /note="Description of Artificial Sequence: Synthetic oligonucleotide"
ccugagaaugaaggccaagg

SEQ ID NO: 2713 - RNA, 20 nt, Artificial Sequence
  source: /note="Description of Artificial Sequence: Synthetic oligonucleotide"
ugcucugcacacuaaaaggc

SEQ ID NO: 2714 - RNA, 20 nt, Artificial Sequence
  source: /note="Description of Artificial Sequence: Synthetic oligonucleotide"
cauccagacaggggcagaug

SEQ ID NO: 2715 - RNA, 20 nt, Artificial Sequence
  source: /note="Description of Artificial Sequence: Synthetic oligonucleotide"
cacaucugccccugucugga

SEQ ID NO: 2716 - RNA, 20 nt, Artificial Sequence
  source: /note="Description of Artificial Sequence: Synthetic oligonucleotide"
ugugggucccaacaaggaca

SEQ ID NO: 2717 - RNA, 20 nt, Artificial Sequence
  source: /note="Description of Artificial Sequence: Synthetic oligonucleotide"
cccacagagcaauggaaucu

SEQ ID NO: 2718 - RNA, 20 nt, Artificial Sequence
  source: /note="Description of Artificial Sequence: Synthetic oligonucleotide"
ggaggcuccagagagcacau

SEQ ID NO: 2719 - RNA, 20 nt, Artificial Sequence
  source: /note="Description of Artificial Sequence: Synthetic oligonucleotide"
ccucacuccugccggguauc

SEQ ID NO: 2720 - RNA, 20 nt, Artificial Sequence
  source: /note="Description of Artificial Sequence: Synthetic oligonucleotide"
cccacagguuagggugguga

SEQ ID NO: 2721 - RNA, 20 nt, Artificial Sequence
  source: /note="Description of Artificial Sequence: Synthetic oligonucleotide"
gcccacagguuaggguggug

SEQ ID NO: 2722 - RNA, 20 nt, Artificial Sequence
  source: /note="Description of Artificial Sequence: Synthetic oligonucleotide"
agcagcacgcccacagguua

SEQ ID NO: 2723 - RNA, 20 nt, Artificial Sequence
  source: /note="Description of Artificial Sequence: Synthetic oligonucleotide"
cagcagcacgcccacagguu

SEQ ID NO: 2724 - RNA, 20 nt, Artificial Sequence
  source: /note="Description of Artificial Sequence: Synthetic oligonucleotide"
ggcggcagcagcacgcccac

SEQ ID NO: 2725 - RNA, 20 nt, Artificial Sequence
  source: /note="Description of Artificial Sequence: Synthetic oligonucleotide"
ccuggucggcugggcguggg

SEQ ID NO: 2726 - RNA, 20 nt, Artificial Sequence
  source: /note="Description of Artificial Sequence: Synthetic oligonucleotide"
ccgcccacgcccagccgacc

SEQ ID NO: 2727 - RNA, 20 nt, Artificial Sequence
  source: /note="Description of Artificial Sequence: Synthetic oligonucleotide"
accugcaggaguguccuggu

SEQ ID NO: 2728 - RNA, 20 nt, Artificial Sequence
  source: /note="Description of Artificial Sequence: Synthetic oligonucleotide"
ggucaccugcaggagugucc

SEQ ID NO: 2729 - RNA, 20 nt, Artificial Sequence
  source: /note="Description of Artificial Sequence: Synthetic oligonucleotide"
gccgaccaggacacuccugc

SEQ ID NO: 2730 - RNA, 20 nt, Artificial Sequence
  source: /note="Description of Artificial Sequence: Synthetic oligonucleotide"
acuccugcaggugaccaugc

SEQ ID NO: 2731 - RNA, 20 nt, Artificial Sequence
  source: /note="Description of Artificial Sequence: Synthetic oligonucleotide"
gcaucguggaacugccagca

SEQ ID NO: 2732 - RNA, 20 nt, Artificial Sequence
  source: /note="Description of Artificial Sequence: Synthetic oligonucleotide"
ucgugcuggcucugggccug

SEQ ID NO: 2733 - RNA, 20 nt, Artificial Sequence
  source: /note="Description of Artificial Sequence: Synthetic oligonucleotide"
ggaugucucgugcuggcucu

SEQ ID NO: 2734 - RNA, 20 nt, Artificial Sequence
  source: /note="Description of Artificial Sequence: Synthetic oligonucleotide"
ggcaaaugggcgugaccgag

SEQ ID NO: 2735 - RNA, 20 nt, Artificial Sequence
  source: /note="Description of Artificial Sequence: Synthetic oligonucleotide"
aucucccgcagcgugucgau

SEQ ID NO: 2736 - RNA, 20 nt, Artificial Sequence
  source: /note="Description of Artificial Sequence: Synthetic oligonucleotide"
gaucucccgcagcgugucga

SEQ ID NO: 2737 - RNA, 20 nt, Artificial Sequence
  source: /note="Description of Artificial Sequence: Synthetic oligonucleotide"
gcucgcccaucgacacgcug

SEQ ID NO: 2738 - RNA, 20 nt, Artificial Sequence
  source: /note="Description of Artificial Sequence: Synthetic oligonucleotide"
gagguccaccaggccgagac

SEQ ID NO: 2739 - RNA, 20 nt, Artificial Sequence
  source: /note="Description of Artificial Sequence: Synthetic oligonucleotide"
gguggguugggagguccacc

SEQ ID NO: 2740 - RNA, 20 nt, Artificial Sequence
  source: /note="Description of Artificial Sequence: Synthetic oligonucleotide"
guggaccucccaacccacca

SEQ ID NO: 2741 - RNA, 20 nt, Artificial Sequence
  source: /note="Description of Artificial Sequence: Synthetic oligonucleotide"
cuuuugggcuuggcccuggu

SEQ ID NO: 2742 - RNA, 20 nt, Artificial Sequence
  source: /note="Description of Artificial Sequence: Synthetic oligonucleotide"
ucaucuuggccagggcuuuu

SEQ ID NO: 2743 - RNA, 20 nt, Artificial Sequence
  source: /note="Description of Artificial Sequence: Synthetic oligonucleotide"
cgccgcccaucaucuuggcc

SEQ ID NO: 2744 - RNA, 20 nt, Artificial Sequence
  source: /note="Description of Artificial Sequence: Synthetic oligonucleotide"
aaagcccuggccaagaugau

SEQ ID NO: 2745 - RNA, 20 nt, Artificial Sequence
  source: /note="Description of Artificial Sequence: Synthetic oligonucleotide"
augaugggcggcgcaggucc

SEQ ID NO: 2746 - RNA, 20 nt, Artificial Sequence
  source: /note="Description of Artificial Sequence: Synthetic oligonucleotide"
caagaaguugccaccaccac

SEQ ID NO: 2747 - RNA, 20 nt, Artificial Sequence
  source: /note="Description of Artificial Sequence: Synthetic oligonucleotide"
aagaaguugccaccaccacc

SEQ ID NO: 2748 - RNA, 20 nt, Artificial Sequence
  source: /note="Description of Artificial Sequence: Synthetic oligonucleotide"
caguuggugaguggcccagg

SEQ ID NO: 2749 - RNA, 20 nt, Artificial Sequence
  source: /note="Description of Artificial Sequence: Synthetic oligonucleotide"
ccgaaagauguucccaggcc

SEQ ID NO: 2750 - RNA, 20 nt, Artificial Sequence
  source: /note="Description of Artificial Sequence: Synthetic oligonucleotide"
uucagcuucuugggcaagga

SEQ ID NO: 2751 - RNA, 20 nt, Artificial Sequence
  source: /note="Description of Artificial Sequence: Synthetic oligonucleotide"
cuucagcuucuugggcaagg

SEQ ID NO: 2752 - RNA, 20 nt, Artificial Sequence
  source: /note="Description of Artificial Sequence: Synthetic oligonucleotide"
aguuccccaugaagggcccc

SEQ ID NO: 2753 - RNA, 20 nt, Artificial Sequence
  source: /note="Description of Artificial Sequence: Synthetic oligonucleotide"
augggugcaguuccccauga

SEQ ID NO: 2754 - RNA, 20 nt, Artificial Sequence
  source: /note="Description of Artificial Sequence: Synthetic oligonucleotide"
uggggaacugcacccaucug

SEQ ID NO: 2755 - RNA, 20 nt, Artificial Sequence
  source: /note="Description of Artificial Sequence: Synthetic oligonucleotide"
ccccccagggacccucagau

SEQ ID NO: 2756 - RNA, 20 nt, Artificial Sequence
  source: /note="Description of Artificial Sequence: Synthetic oligonucleotide"
cacccaucugagggucccug

SEQ ID NO: 2757 - RNA, 20 nt, Artificial Sequence
  source: /note="Description of Artificial Sequence: Synthetic oligonucleotide"
agggucccuggggggcacca

SEQ ID NO: 2758 - RNA, 20 nt, Artificial Sequence
  source: /note="Description of Artificial Sequence: Synthetic oligonucleotide"
ucacacuuacacagguucag

SEQ ID NO: 2759 - RNA, 20 nt, Artificial Sequence
  source: /note="Description of Artificial Sequence: Synthetic oligonucleotide"
gucacacuuacacagguuca

SEQ ID NO: 2760 - RNA, 20 nt, Artificial Sequence
  source: /note="Description of Artificial Sequence: Synthetic oligonucleotide"
ggucacacuuacacagguuc

SEQ ID NO: 2761 - RNA, 20 nt, Artificial Sequence
  source: /note="Description of Artificial Sequence: Synthetic oligonucleotide"
cugcagggucacacuuacac

SEQ ID NO: 2762 - RNA, 20 nt, Artificial Sequence
  source: /note="Description of Artificial Sequence: Synthetic oligonucleotide"
uguucucccugcccuacugc

SEQ ID NO: 2763 - RNA, 20 nt, Artificial Sequence
  source: /note="Description of Artificial Sequence: Synthetic oligonucleotide"
ggcagggagaacaguuggag

SEQ ID NO: 2764 - RNA, 20 nt, Artificial Sequence
  source: /note="Description of Artificial Sequence: Synthetic oligonucleotide"
gauacccccaaggggaggca

SEQ ID NO: 2765 - RNA, 20 nt, Artificial Sequence
  source: /note="Description of Artificial Sequence: Synthetic oligonucleotide"
gcacucuggauacccccaag

SEQ ID NO: 2766 - RNA, 20 nt, Artificial Sequence
  source: /note="Description of Artificial Sequence: Synthetic oligonucleotide"
ggggguauccagagugccua

SEQ ID NO: 2767 - RNA, 20 nt, Artificial Sequence
  source: /note="Description of Artificial Sequence: Synthetic oligonucleotide"
cucccuuccaauucaacccu

SEQ ID NO: 2768 - RNA, 20 nt, Artificial Sequence
  source: /note="Description of Artificial Sequence: Synthetic oligonucleotide"
cagagugccuaggguugaau

SEQ ID NO: 2769 - RNA, 20 nt, Artificial Sequence
  source: /note="Description of Artificial Sequence: Synthetic oligonucleotide"
gugccuaggguugaauugga

SEQ ID NO: 2770 - RNA, 20 nt, Artificial Sequence
  source: /note="Description of Artificial Sequence: Synthetic oligonucleotide"
ugccuaggguugaauuggaa

SEQ ID NO: 2771 - RNA, 20 nt, Artificial Sequence
  source: /note="Description of Artificial Sequence: Synthetic oligonucleotide"
aauuggaagggaggacacgc

SEQ ID NO: 2772 - RNA, 20 nt, Artificial Sequence
  source: /note="Description of Artificial Sequence: Synthetic oligonucleotide"
gagcagcagcucaguugcag

SEQ ID NO: 2773 - RNA, 20 nt, Artificial Sequence
  source: /note="Description of Artificial Sequence: Synthetic oligonucleotide"
uugagcagcagcucaguugc

SEQ ID NO: 2774 - RNA, 20 nt, Artificial Sequence
  source: /note="Description of Artificial Sequence: Synthetic oligonucleotide"
gauugaaauggcacaagaga

SEQ ID NO: 2775 - RNA, 20 nt, Artificial Sequence
  source: /note="Description of Artificial Sequence: Synthetic oligonucleotide"
uuucucccuaggagucuggc

SEQ ID NO: 2776 - RNA, 20 nt, Artificial Sequence
  source: /note="Description of Artificial Sequence: Synthetic oligonucleotide"
uccccgcagucuuucucccu

SEQ ID NO: 2777 - RNA, 20 nt, Artificial Sequence
  source: /note="Description of Artificial Sequence: Synthetic oligonucleotide"
acuccuagggagaaagacug

SEQ ID NO: 2778 - RNA, 20 nt, Artificial Sequence
  source: /note="Description of Artificial Sequence: Synthetic oligonucleotide"
cuccuagggagaaagacugc

SEQ ID NO: 2779 - RNA, 20 nt, Artificial Sequence
  source: /note="Description of Artificial Sequence: Synthetic oligonucleotide"
gucugcuacagcaggagcgu

SEQ ID NO: 2780 - RNA, 20 nt, Artificial Sequence
  source: /note="Description of Artificial Sequence: Synthetic oligonucleotide"
cugugucuuucugacauuuu

SEQ ID NO: 2781 - RNA, 20 nt, Artificial Sequence
  source: /note="Description of Artificial Sequence: Synthetic oligonucleotide"
cacauaaagcuagacugugg

SEQ ID NO: 2782 - RNA, 20 nt, Artificial Sequence
  source: /note="Description of Artificial Sequence: Synthetic oligonucleotide"
caagaaaaccagacagaguu

SEQ ID NO: 2783 - RNA, 20 nt, Artificial Sequence
  source: /note="Description of Artificial Sequence: Synthetic oligonucleotide"
agcaagugacauuacaauga

SEQ ID NO: 2784 - RNA, 20 nt, Artificial Sequence
  source: /note="Description of Artificial Sequence: Synthetic oligonucleotide"
gcacuguguucauucugcuc

SEQ ID NO: 2785 - RNA, 20 nt, Artificial Sequence
  source: /note="Description of Artificial Sequence: Synthetic oligonucleotide"
uucauucugcucagguugau

SEQ ID NO: 2786 - RNA, 20 nt, Artificial Sequence
  source: /note="Description of Artificial Sequence: Synthetic oligonucleotide"
acuuugggacggucuaaaau

SEQ ID NO: 2787 - RNA, 20 nt, Artificial Sequence
  source: /note="Description of Artificial Sequence: Synthetic oligonucleotide"
auaccucccuguaugauccu

SEQ ID NO: 2788 - RNA, 20 nt, Artificial Sequence
  source: /note="Description of Artificial Sequence: Synthetic oligonucleotide"
cagaagagccagauguuaaa

SEQ ID NO: 2789 - RNA, 20 nt, Artificial Sequence
  source: /note="Description of Artificial Sequence: Synthetic oligonucleotide"
ccagauguuaaaagggccuc

SEQ ID NO: 2790 - RNA, 20 nt, Artificial Sequence
  source: /note="Description of Artificial Sequence: Synthetic oligonucleotide"
caacaaccugcucccucauc

SEQ ID NO: 2791 - RNA, 20 nt, Artificial Sequence
  source: /note="Description of Artificial Sequence: Synthetic oligonucleotide"
gguuguugcggucugguggg

SEQ ID NO: 2792 - RNA, 20 nt, Artificial Sequence
  source: /note="Description of Artificial Sequence: Synthetic oligonucleotide"
gucuggugggugguguggac

SEQ ID NO: 2793 - RNA, 20 nt, Artificial Sequence
  source: /note="Description of Artificial Sequence: Synthetic oligonucleotide"
ugguguggacagggguagcu

SEQ ID NO: 2794 - RNA, 20 nt, Artificial Sequence
  source: /note="Description of Artificial Sequence: Synthetic oligonucleotide"
uaggcagcuggcacugauac

SEQ ID NO: 2795 - RNA, 20 nt, Artificial Sequence
  source: /note="Description of Artificial Sequence: Synthetic oligonucleotide"
gggacgcugcaggggaucca

SEQ ID NO: 2796 - RNA, 20 nt, Artificial Sequence
  source: /note="Description of Artificial Sequence: Synthetic oligonucleotide"
cucugcccgggacgcugcag

SEQ ID NO: 2797 - RNA, 20 nt, Artificial Sequence
  source: /note="Description of Artificial Sequence: Synthetic oligonucleotide"
cuggauccccugcagcgucc

SEQ ID NO: 2798 - RNA, 20 nt, Artificial Sequence
  source: /note="Description of Artificial Sequence: Synthetic oligonucleotide"
uggauccccugcagcguccc

SEQ ID NO: 2799 - RNA, 20 nt, Artificial Sequence
  source: /note="Description of Artificial Sequence: Synthetic oligonucleotide"
gucgcgcaccggcucugccc

SEQ ID NO: 2800 - RNA, 20 nt, Artificial Sequence
  source: /note="Description of Artificial Sequence: Synthetic oligonucleotide"
ugucgcgcaccggcucugcc

SEQ ID NO: 2801 - RNA, 20 nt, Artificial Sequence
  source: /note="Description of Artificial Sequence: Synthetic oligonucleotide"
ugcagcgucccgggcagagc

SEQ ID NO: 2802 - RNA, 20 nt, Artificial Sequence
  source: /note="Description of Artificial Sequence: Synthetic oligonucleotide"
acucgccgcagaacucacag

SEQ ID NO: 2803 - RNA, 20 nt, Artificial Sequence
  source: /note="Description of Artificial Sequence: Synthetic oligonucleotide"
gucacgcgcgcucacaccug

SEQ ID NO: 2804 - RNA, 20 nt, Artificial Sequence
  source: /note="Description of Artificial Sequence: Synthetic oligonucleotide"
gcgcucacaccugcggcaga

SEQ ID NO: 2805 - RNA, 20 nt, Artificial Sequence
  source: /note="Description of Artificial Sequence: Synthetic oligonucleotide"
gucgaugggcgaaccauuga

SEQ ID NO: 2806 - RNA, 20 nt, Artificial Sequence
  source: /note="Description of Artificial Sequence: Synthetic oligonucleotide"
aucucucgcagugugucgau

SEQ ID NO: 2807 - RNA, 20 nt, Artificial Sequence
  source: /note="Description of Artificial Sequence: Synthetic oligonucleotide"
gaucucucgcagugugucga

SEQ ID NO: 2808 - RNA, 20 nt, Artificial Sequence
  source: /note="Description of Artificial Sequence: Synthetic oligonucleotide"
cuucuugaugaggcacggcu

SEQ ID NO: 2809 - RNA, 20 nt, Artificial Sequence
  source: /note="Description of Artificial Sequence: Synthetic oligonucleotide"
caagccgugccucaucaaga

SEQ ID NO: 2810 - RNA, 20 nt, Artificial Sequence
  source: /note="Description of Artificial Sequence: Synthetic oligonucleotide"
cccguccucagccagggcag

SEQ ID NO: 2811 - RNA, 20 nt, Artificial Sequence
  source: /note="Description of Artificial Sequence: Synthetic oligonucleotide"
ggcccguccucagccagggc

SEQ ID NO: 2812 - RNA, 20 nt, Artificial Sequence
  source: /note="Description of Artificial Sequence: Synthetic oligonucleotide"
ugggaggcccguccucagcc

SEQ ID NO: 2813 - RNA, 20 nt, Artificial Sequence
  source: /note="Description of Artificial Sequence: Synthetic oligonucleotide"
acgggcccaggggccacggu

SEQ ID NO: 2814 - RNA, 20 nt, Artificial Sequence
  source: /note="Description of Artificial Sequence: Synthetic oligonucleotide"
cacgggcccaggggccacgg

SEQ ID NO: 2815 - RNA, 20 nt, Artificial Sequence
  source: /note="Description of Artificial Sequence: Synthetic oligonucleotide"
cagcggcaguggggacugca

SEQ ID NO: 2816 - RNA, 20 nt, Artificial Sequence
  source: /note="Description of Artificial Sequence: Synthetic oligonucleotide"
caggggcgacagcggcagug

SEQ ID NO: 2817 - RNA, 20 nt, Artificial Sequence
  source: /note="Description of Artificial Sequence: Synthetic oligonucleotide"
ccaggggcgacagcggcagu

SEQ ID NO: 2818 - RNA, 20 nt, Artificial Sequence
  source: /note="Description of Artificial Sequence: Synthetic oligonucleotide"
cccacugccgcugucgcccc

SEQ ID NO: 2819 - RNA, 20 nt, Artificial Sequence
  source: /note="Description of Artificial Sequence: Synthetic oligonucleotide"
uugccuggccggccagccag

SEQ ID NO: 2820 - RNA, 20 nt, Artificial Sequence
  source: /note="Description of Artificial Sequence: Synthetic oligonucleotide"
cugcaccugguuugccuggc

SEQ ID NO: 2821 - RNA, 20 nt, Artificial Sequence
  source: /note="Description of Artificial Sequence: Synthetic oligonucleotide"
ggccaggcaaaccaggugca

SEQ ID NO: 2822 - RNA, 20 nt, Artificial Sequence
  source: /note="Description of Artificial Sequence: Synthetic oligonucleotide"
ggcgucaggcugagcucacg

SEQ ID NO: 2823 - RNA, 20 nt, Artificial Sequence
  source: /note="Description of Artificial Sequence: Synthetic oligonucleotide"
ggcagccaagcggccccugc

SEQ ID NO: 2824 - RNA, 20 nt, Artificial Sequence
  source: /note="Description of Artificial Sequence: Synthetic oligonucleotide"
gaggaggcgguccuccugca

SEQ ID NO: 2825 - RNA, 20 nt, Artificial Sequence
  source: /note="Description of Artificial Sequence: Synthetic oligonucleotide"
ccgcugcuuacaggaguggg

SEQ ID NO: 2826 - RNA, 20 nt, Artificial Sequence
  source: /note="Description of Artificial Sequence: Synthetic oligonucleotide"
ccgcccgcugcuuacaggag

SEQ ID NO: 2827 - RNA, 20 nt, Artificial Sequence
  source: /note="Description of Artificial Sequence: Synthetic oligonucleotide"
cccugccgcccgcugcuuac

SEQ ID NO: 2828 - RNA, 20 nt, Artificial Sequence
  source: /note="Description of Artificial Sequence: Synthetic oligonucleotide"
guggcauugccuggccuggc

SEQ ID NO: 2829 - RNA, 20 nt, Artificial Sequence
  source: /note="Description of Artificial Sequence: Synthetic oligonucleotide"
ccaaguggggcccccauggc

SEQ ID NO: 2830 - RNA, 20 nt, Artificial Sequence
  source: /note="Description of Artificial Sequence: Synthetic oligonucleotide"
ucccacacagacccagccau

SEQ ID NO: 2831 - RNA, 20 nt, Artificial Sequence
  source: /note="Description of Artificial Sequence: Synthetic oligonucleotide"
cucccacacagacccagcca

SEQ ID NO: 2832 - RNA, 20 nt, Artificial Sequence
  source: /note="Description of Artificial Sequence: Synthetic oligonucleotide"
cauggcugggucuguguggg

SEQ ID NO: 2833 - RNA, 20 nt, Artificial Sequence
  source: /note="Description of Artificial Sequence: Synthetic oligonucleotide"
gucugugugggaggcgggau

SEQ ID NO: 2834 - RNA, 20 nt, Artificial Sequence
  source: /note="Description of Artificial Sequence: Synthetic oligonucleotide"
ugggaggcgggauuggcacc

SEQ ID NO: 2835 - RNA, 20 nt, Artificial Sequence
  source: /note="Description of Artificial Sequence: Synthetic oligonucleotide"
gcgggauuggcaccuggccu

SEQ ID NO: 2836 - RNA, 20 nt, Artificial Sequence
  source: /note="Description of Artificial Sequence: Synthetic oligonucleotide"
cugggugcaccugcccccuu

SEQ ID NO: 2837 - RNA, 20 nt, Artificial Sequence
  source: /note="Description of Artificial Sequence: Synthetic oligonucleotide"
gcugcugagucacagcccaa

SEQ ID NO: 2838 - RNA, 20 nt, Artificial Sequence
  source: /note="Description of Artificial Sequence: Synthetic oligonucleotide"
agcaggccucgguggcugcg

SEQ ID NO: 2839 - RNA, 20 nt, Artificial Sequence
  source: /note="Description of Artificial Sequence: Synthetic oligonucleotide"
ugcccgugcguggcuggcca

SEQ ID NO: 2840 - RNA, 20 nt, Artificial Sequence
  source: /note="Description of Artificial Sequence: Synthetic oligonucleotide"
gccgcaggugugcccgugcg

SEQ ID NO: 2841 - RNA, 20 nt, Artificial Sequence
  source: /note="Description of Artificial Sequence: Synthetic oligonucleotide"
gaucaaacaccggccccaga

SEQ ID NO: 2842 - RNA, 20 nt, Artificial Sequence
  source: /note="Description of Artificial Sequence: Synthetic oligonucleotide"
cgguaggcgcccaccuucug

SEQ ID NO: 2843 - RNA, 20 nt, Artificial Sequence
  source: /note="Description of Artificial Sequence: Synthetic oligonucleotide"
gcgguaggcgcccaccuucu

SEQ ID NO: 2844 - RNA, 20 nt, Artificial Sequence
  source: /note="Description of Artificial Sequence: Synthetic oligonucleotide"
aaacaccggccccagaaggu

SEQ ID NO: 2845 - RNA, 20 nt, Artificial Sequence
  source: /note="Description of Artificial Sequence: Synthetic oligonucleotide"
ugcgguaggcgcccaccuuc

SEQ ID NO: 2846 - RNA, 20 nt, Artificial Sequence
  source: /note="Description of Artificial Sequence: Synthetic oligonucleotide"
uaccgcagcuacauccaggg

SEQ ID NO: 2847 - RNA, 20 nt, Artificial Sequence
  source: /note="Description of Artificial Sequence: Synthetic oligonucleotide"
cacggccauggccggcacug

SEQ ID NO: 2848 - RNA, 20 nt, Artificial Sequence
  source: /note="Description of Artificial Sequence: Synthetic oligonucleotide"
aaguuccgcagugccggcca

SEQ ID NO: 2849 - RNA, 20 nt, Artificial Sequence
  source: /note="Description of Artificial Sequence: Synthetic oligonucleotide"
ccgaccacggccaggccccc

SEQ ID NO: 2850 - RNA, 20 nt, Artificial Sequence
  source: /note="Description of Artificial Sequence: Synthetic oligonucleotide"
ggcacccgggggccuggccg

SEQ ID NO: 2851 - RNA, 20 nt, Artificial Sequence
  source: /note="Description of Artificial Sequence: Synthetic oligonucleotide"
cuggcuccccuccggcacug

SEQ ID NO: 2852 - RNA, 20 nt, Artificial Sequence
  source: /note="Description of Artificial Sequence: Synthetic oligonucleotide"
cgcagugccggaggggagcc

SEQ ID NO: 2853 - RNA, 20 nt, Artificial Sequence
  source: /note="Description of Artificial Sequence: Synthetic oligonucleotide"
gucggcugcccggccagccu

SEQ ID NO: 2854 - RNA, 20 nt, Artificial Sequence
  source: /note="Description of Artificial Sequence: Synthetic oligonucleotide"
gggcagccgacgguggugag

SEQ ID NO: 2855 - RNA, 20 nt, Artificial Sequence
  source: /note="Description of Artificial Sequence: Synthetic oligonucleotide"
gaacaucaacagugagugcu

SEQ ID NO: 2856 - RNA, 20 nt, Artificial Sequence
  source: /note="Description of Artificial Sequence: Synthetic oligonucleotide"
gggccacagcagagcgccug

SEQ ID NO: 2857 - RNA, 20 nt, Artificial Sequence
  source: /note="Description of Artificial Sequence: Synthetic oligonucleotide"
aagggccacagcagagcgcc

SEQ ID NO: 2858 - RNA, 20 nt, Artificial Sequence
  source: /note="Description of Artificial Sequence: Synthetic oligonucleotide"
cuaccuggaugggugggaug

SEQ ID NO: 2859 - RNA, 20 nt, Artificial Sequence
  source: /note="Description of Artificial Sequence: Synthetic oligonucleotide"
ugcuaccuggauggguggga

SEQ ID NO: 2860 - RNA, 20 nt, Artificial Sequence
  source: /note="Description of Artificial Sequence: Synthetic oligonucleotide"
cugaugcuaccuggaugggu

SEQ ID NO: 2861 - RNA, 20 nt, Artificial Sequence
  source: /note="Description of Artificial Sequence: Synthetic oligonucleotide"
gggacgggagaugaguggga

SEQ ID NO: 2862 - RNA, 20 nt, Artificial Sequence
  source: /note="Description of Artificial Sequence: Synthetic oligonucleotide"
ucaaauucuaagguggagag

SEQ ID NO: 2863 - RNA, 20 nt, Artificial Sequence
  source: /note="Description of Artificial Sequence: Synthetic oligonucleotide"
guucaaauucuaagguggag

SEQ ID NO: 2864 - RNA, 20 nt, Artificial Sequence
  source: /note="Description of Artificial Sequence: Synthetic oligonucleotide"
ucggcguucaaauucuaagg

SEQ ID NO: 2865 - RNA, 20 nt, Artificial Sequence
  source: /note="Description of Artificial Sequence: Synthetic oligonucleotide"
ccccgggcugcggaggcauc

SEQ ID NO: 2866 - RNA, 20 nt, Artificial Sequence
  source: /note="Description of Artificial Sequence: Synthetic oligonucleotide"
guccucgccuccccgggcug

SEQ ID NO: 2867 - RNA, 20 nt, Artificial Sequence
  source: /note="Description of Artificial Sequence: Synthetic oligonucleotide"
cauugguguccucgccuccc

SEQ ID NO: 2868 - RNA, 20 nt, Artificial Sequence
  source: /note="Description of Artificial Sequence: Synthetic oligonucleotide"
cuugacaagugaugucuggg

SEQ ID NO: 2869 - RNA, 20 nt, Artificial Sequence
  source: /note="Description of Artificial Sequence: Synthetic oligonucleotide"
aacuugacaagugaugucug

SEQ ID NO: 2870 - RNA, 20 nt, Artificial Sequence
  source: /note="Description of Artificial Sequence: Synthetic oligonucleotide"
ggcagccuaccugcauuuga

SEQ ID NO: 2871 - RNA, 20 nt, Artificial Sequence
  source: /note="Description of Artificial Sequence: Synthetic oligonucleotide"
aaugcagguaggcugccccu

SEQ ID NO: 2872 - RNA, 20 nt, Artificial Sequence
  source: /note="Description of Artificial Sequence: Synthetic oligonucleotide"
ugcagguaggcugccccugg

SEQ ID NO: 2873 - RNA, 20 nt, Artificial Sequence
  source: /note="Description of Artificial Sequence: Synthetic oligonucleotide"
agguaggcugccccuggggg

SEQ ID NO: 2874 - RNA, 20 nt, Artificial Sequence
  source: /note="Description of Artificial Sequence: Synthetic oligonucleotide"
accuuggucacccggagccu

SEQ ID NO: 2875 - RNA, 20 nt, Artificial Sequence
  source: /note="Description of Artificial Sequence: Synthetic oligonucleotide"
gcugggaggugucgccucag

SEQ ID NO: 2876 - RNA, 20 nt, Artificial Sequence
  source: /note="Description of Artificial Sequence: Synthetic oligonucleotide"
acacccaagggcagccacug

SEQ ID NO: 2877 - RNA, 20 nt, Artificial Sequence
  source: /note="Description of Artificial Sequence: Synthetic oligonucleotide"
gucgccucaguggcugcccu

SEQ ID NO: 2878 - RNA, 20 nt, Artificial Sequence
  source: /note="Description of Artificial Sequence: Synthetic oligonucleotide"
ucgccucaguggcugcccuu

SEQ ID NO: 2879 - RNA, 20 nt, Artificial Sequence
  source: /note="Description of Artificial Sequence: Synthetic oligonucleotide"
cucgcaggcuacaaagcuca

SEQ ID NO: 2880 - RNA, 20 nt, Artificial Sequence
  source: /note="Description of Artificial Sequence: Synthetic oligonucleotide"
ucucgcaggcuacaaagcuc

SEQ ID NO: 2881 - RNA, 20 nt, Artificial Sequence
  source: /note="Description of Artificial Sequence: Synthetic oligonucleotide"
agcagguaaguccuucccug

SEQ ID NO: 2882 - RNA, 20 nt, Artificial Sequence
  source: /note="Description of Artificial Sequence: Synthetic oligonucleotide"
ucaacccgcuuuuaugagug

SEQ ID NO: 2883 - RNA, 20 nt, Artificial Sequence
  source: /note="Description of Artificial Sequence: Synthetic oligonucleotide"
uucaauguacuuguggacuu

SEQ ID NO: 2884 - RNA, 20 nt, Artificial Sequence
  source: /note="Description of Artificial Sequence: Synthetic oligonucleotide"
aagcuccauggcucaagacg

SEQ ID NO: 2885 - RNA, 20 nt, Artificial Sequence
  source: /note="Description of Artificial Sequence: Synthetic oligonucleotide"
aaaaaggccucacagcacag

SEQ ID NO: 2886 - RNA, 20 nt, Artificial Sequence
  source: /note="Description of Artificial Sequence: Synthetic oligonucleotide"
auagaaucugagacaguaga

SEQ ID NO: 2887 - RNA, 20 nt, Artificial Sequence
  source: /note="Description of Artificial Sequence: Synthetic oligonucleotide"
gauucuauguaucugccaga

SEQ ID NO: 2888 - RNA, 20 nt, Artificial Sequence
  source: /note="Description of Artificial Sequence: Synthetic oligonucleotide"
ugccagauggcagggguacc

SEQ ID NO: 2889 - RNA, 20 nt, Artificial Sequence
  source: /note="Description of Artificial Sequence: Synthetic oligonucleotide"
aagucacuggugccagguaa

SEQ ID NO: 2890 - RNA, 20 nt, Artificial Sequence
  source: /note="Description of Artificial Sequence: Synthetic oligonucleotide"
gcucagaagucacuggugcc

SEQ ID NO: 2891 - RNA, 20 nt, Artificial Sequence
  source: /note="Description of Artificial Sequence: Synthetic oligonucleotide"
acuucugagcacagaggcag

SEQ ID NO: 2892 - RNA, 20 nt, Artificial Sequence
  source: /note="Description of Artificial Sequence: Synthetic oligonucleotide"
acucaccauggggucauggc

SEQ ID NO: 2893 - RNA, 20 nt, Artificial Sequence
  source: /note="Description of Artificial Sequence: Synthetic oligonucleotide"
agccaccuccacucaccaug

SEQ ID NO: 2894 - RNA, 20 nt, Artificial Sequence
  source: /note="Description of Artificial Sequence: Synthetic oligonucleotide"
caugaccccauggugagugg

SEQ ID NO: 2895 - RNA, 20 nt, Artificial Sequence
  source: /note="Description of Artificial Sequence: Synthetic oligonucleotide"
gaccccauggugaguggagg

SEQ ID NO: 2896 - RNA, 20 nt, Artificial Sequence
  source: /note="Description of Artificial Sequence: Synthetic oligonucleotide"
acaccugcugcuacucagug

SEQ ID NO: 2897 - RNA, 20 nt, Artificial Sequence
  source: /note="Description of Artificial Sequence: Synthetic oligonucleotide"
uguccacacugaguagcagc

SEQ ID NO: 2898 - RNA, 20 nt, Artificial Sequence
  source: /note="Description of Artificial Sequence: Synthetic oligonucleotide"
auagccuugccagcaucccu

SEQ ID NO: 2899 - RNA, 20 nt, Artificial Sequence
  source: /note="Description of Artificial Sequence: Synthetic oligonucleotide"
caccucacagaaccugcaug

SEQ ID NO: 2900 - RNA, 20 nt, Artificial Sequence
  source: /note="Description of Artificial Sequence: Synthetic oligonucleotide"
uccaccucacagaaccugca

SEQ ID NO: 2901 - RNA, 20 nt, Artificial Sequence
  source: /note="Description of Artificial Sequence: Synthetic oligonucleotide"
ucccccaugcagguucugug

SEQ ID NO: 2902 - RNA, 20 nt, Artificial Sequence
  source: /note="Description of Artificial Sequence: Synthetic oligonucleotide"
cccaugcagguucugugagg

SEQ ID NO: 2903 - RNA, 20 nt, Artificial Sequence
  source: /note="Description of Artificial Sequence: Synthetic oligonucleotide"
cccacucuuccuggauggag

SEQ ID NO: 2904 - RNA, 20 nt, Artificial Sequence
  source: /note="Description of Artificial Sequence: Synthetic oligonucleotide"
ccgcacccacucuuccugga

SEQ ID NO: 2905 - RNA, 20 nt, Artificial Sequence
  source: /note="Description of Artificial Sequence: Synthetic oligonucleotide"
cucaggugggggguccgcuu

SEQ ID NO: 2906 - RNA, 20 nt, Artificial Sequence
  source: /note="Description of Artificial Sequence: Synthetic oligonucleotide"
ccugggacuccucagguggg

SEQ ID NO: 2907 - RNA, 20 nt, Artificial Sequence
  source: /note="Description of Artificial Sequence: Synthetic oligonucleotide"
gagguuuuggcuugcuccuu

SEQ ID NO: 2908 - RNA, 20 nt, Artificial Sequence
  source: /note="Description of Artificial Sequence: Synthetic oligonucleotide"
agcaagccaaaaccucaaac

SEQ ID NO: 2909 - RNA, 20 nt, Artificial Sequence
  source: /note="Description of Artificial Sequence: Synthetic oligonucleotide"
gcccggcccccaaggggcgc

SEQ ID NO: 2910 - RNA, 20 nt, Artificial Sequence
  source: /note="Description of Artificial Sequence: Synthetic oligonucleotide"
accucaaaccggcgccccuu

SEQ ID NO: 2911 - RNA, 20 nt, Artificial Sequence
  source: /note="Description of Artificial Sequence: Synthetic oligonucleotide"
gaguccucgggcugggggaa

SEQ ID NO: 2912 - RNA, 20 nt, Artificial Sequence
  source: /note="Description of Artificial Sequence: Synthetic oligonucleotide"
ggccccagaguccucgggcu

SEQ ID NO: 2913 - RNA, 20 nt, Artificial Sequence
  source: /note="Description of Artificial Sequence: Synthetic oligonucleotide"
ucccccagcccgaggacucu

SEQ ID NO: 2914 - RNA, 20 nt, Artificial Sequence
  source: /note="Description of Artificial Sequence: Synthetic oligonucleotide"
gucucugauggcagccgguc

SEQ ID NO: 2915 - RNA, 20 nt, Artificial Sequence
  source: /note="Description of Artificial Sequence: Synthetic oligonucleotide"
ugugugagaggauauucaug

SEQ ID NO: 2916 - RNA, 20 nt, Artificial Sequence
  source: /note="Description of Artificial Sequence: Synthetic oligonucleotide"
ggcaggucccgggucucacg

SEQ ID NO: 2917 - RNA, 20 nt, Artificial Sequence
  source: /note="Description of Artificial Sequence: Synthetic oligonucleotide"
agcugggaaggccccucucg

SEQ ID NO: 2918 - RNA, 20 nt, Artificial Sequence
  source: /note="Description of Artificial Sequence: Synthetic oligonucleotide"
cgagaggggccuucccagcu

SEQ ID NO: 2919 - RNA, 20 nt, Artificial Sequence
  source: /note="Description of Artificial Sequence: Synthetic oligonucleotide"
gggggccuugacauggcagg

SEQ ID NO: 2920 - RNA, 20 nt, Artificial Sequence
  source: /note="Description of Artificial Sequence: Synthetic oligonucleotide"
agcugccuccugccauguca

SEQ ID NO: 2921 - RNA, 20 nt, Artificial Sequence
  source: /note="Description of Artificial Sequence: Synthetic oligonucleotide"
gagccccugaggcucuuugg

SEQ ID NO: 2922 - RNA, 20 nt, Artificial Sequence
  source: /note="Description of Artificial Sequence: Synthetic oligonucleotide"
cagagccccugaggcucuuu

SEQ ID NO: 2923 - RNA, 20 nt, Artificial Sequence
  source: /note="Description of Artificial Sequence: Synthetic oligonucleotide"
aggccccccaaagagccuca

SEQ ID NO: 2924 - RNA, 20 nt, Artificial Sequence
  source: /note="Description of Artificial Sequence: Synthetic oligonucleotide"
cgcguuuuuaaaaaagugaa

SEQ ID NO: 2925 - RNA, 20 nt, Artificial Sequence
  source: /note="Description of Artificial Sequence: Synthetic oligonucleotide"
uguguagagaauaaggaacg

SEQ ID NO: 2926 - RNA, 20 nt, Artificial Sequence
  source: /note="Description of Artificial Sequence: Synthetic oligonucleotide"
uuuuuucaguggccacauuu

SEQ ID NO: 2927 - RNA, 20 nt, Artificial Sequence
  source: /note="Description of Artificial Sequence: Synthetic oligonucleotide"
uuucucuucuggaaacaccc

SEQ ID NO: 2928 - RNA, 20 nt, Artificial Sequence
  source: /note="Description of Artificial Sequence: Synthetic oligonucleotide"
acacgcuggccgccugcccc

SEQ ID NO: 2929 - RNA, 20 nt, Artificial Sequence
  source: /note="Description of Artificial Sequence: Synthetic oligonucleotide"
cuugacagaaaaacacacgc

SEQ ID NO: 2930 - RNA, 20 nt, Artificial Sequence
  source: /note="Description of Artificial Sequence: Synthetic oligonucleotide"
uuucugucaaguggacaggc

SEQ ID NO: 2931 - RNA, 20 nt, Artificial Sequence
  source: /note="Description of Artificial Sequence: Synthetic oligonucleotide"
ucaaguggacaggcuggcau

SEQ ID NO: 2932 - RNA, 20 nt, Artificial Sequence
  source: /note="Description of Artificial Sequence: Synthetic oligonucleotide"
guggacaggcuggcauuggc

SEQ ID NO: 2933 - RNA, 20 nt, Artificial Sequence
  source: /note="Description of Artificial Sequence: Synthetic oligonucleotide"
cuggcauuggcuggcagccg

SEQ ID NO: 2934 - RNA, 20 nt, Artificial Sequence
  source: /note="Description of Artificial Sequence: Synthetic oligonucleotide"
cauuggcuggcagccggggc

SEQ ID NO: 2935 - RNA, 20 nt, Artificial Sequence
  source: /note="Description of Artificial Sequence: Synthetic oligonucleotide"
ccagggccuccauggcgcuc

SEQ ID NO: 2936 - RNA, 20 nt, Artificial Sequence
  source: /note="Description of Artificial Sequence: Synthetic oligonucleotide"
cuccucuguccagagcgcca

SEQ ID NO: 2937 - RNA, 20 nt, Artificial Sequence
  source: /note="Description of Artificial Sequence: Synthetic oligonucleotide"
cagagcgccauggaggcccu

SEQ ID NO: 2938 - RNA, 20 nt, Artificial Sequence
  source: /note="Description of Artificial Sequence: Synthetic oligonucleotide"
gagccaacagcugggaacuu

SEQ ID NO: 2939 - RNA, 20 nt, Artificial Sequence
  source: /note="Description of Artificial Sequence: Synthetic oligonucleotide"
gagcccaaguucccagcugu

SEQ ID NO: 2940 - RNA, 20 nt, Artificial Sequence
  source: /note="Description of Artificial Sequence: Synthetic oligonucleotide"
ucucuggcuggcuggcaaag

SEQ ID NO: 2941 - RNA, 20 nt, Artificial Sequence
  source: /note="Description of Artificial Sequence: Synthetic oligonucleotide"
cuccagugagcagaugaacc

SEQ ID NO: 2942 - RNA, 20 nt, Artificial Sequence
  source: /note="Description of Artificial Sequence: Synthetic oligonucleotide"
uccagugagcagaugaacca

SEQ ID NO: 2943 - RNA, 20 nt, Artificial Sequence
  source: /note="Description of Artificial Sequence: Synthetic oligonucleotide"
agacaggcugcccagaaccc

SEQ ID NO: 2944 - RNA, 20 nt, Artificial Sequence
  source: /note="Description of Artificial Sequence: Synthetic oligonucleotide"
agcagaugaaccaggguucu

SEQ ID NO: 2945 - RNA, 20 nt, Artificial Sequence
  source: /note="Description of Artificial Sequence: Synthetic oligonucleotide"
caagaagcaguugaggcuag

SEQ ID NO: 2946 - RNA, 20 nt, Artificial Sequence
  source: /note="Description of Artificial Sequence: Synthetic oligonucleotide"
cgggucccugacacccucgc

SEQ ID NO: 2947 - RNA, 20 nt, Artificial Sequence
  source: /note="Description of Artificial Sequence: Synthetic oligonucleotide"
cccacccaaaugcucccaac

SEQ ID NO: 2948 - RNA, 20 nt, Artificial Sequence
  source: /note="Description of Artificial Sequence: Synthetic oligonucleotide"
ccccacccaaaugcucccaa

SEQ ID NO: 2949 - RNA, 20 nt, Artificial Sequence
  source: /note="Description of Artificial Sequence: Synthetic oligonucleotide"
cguugggagcauuugggugg

SEQ ID NO: 2950 - RNA, 20 nt, Artificial Sequence
  source: /note="Description of Artificial Sequence: Synthetic oligonucleotide"
ccagcucucuacaaccccac

SEQ ID NO: 2951 - RNA, 20 nt, Artificial Sequence
  source: /note="Description of Artificial Sequence: Synthetic oligonucleotide"
cccgcauguuccuuggguca

SEQ ID NO: 2952 - RNA, 20 nt, Artificial Sequence
  source: /note="Description of Artificial Sequence: Synthetic oligonucleotide"
acacaugcaccccugaccca

SEQ ID NO: 2953 - RNA, 20 nt, Artificial Sequence
  source: /note="Description of Artificial Sequence: Synthetic oligonucleotide"
ccccgcauguuccuuggguc

SEQ ID NO: 2954 - RNA, 20 nt, Artificial Sequence
  source: /note="Description of Artificial Sequence: Synthetic oligonucleotide"
ccugacccaaggaacaugcg

SEQ ID NO: 2955 - RNA, 20 nt, Artificial Sequence
  source: /note="Description of Artificial Sequence: Synthetic oligonucleotide"
gcggggaaaagaggagccac

SEQ ID NO: 2956 - RNA, 20 nt, Artificial Sequence
  source: /note="Description of Artificial Sequence: Synthetic oligonucleotide"
gaaaauaaauaacaucgcaa

SEQ ID NO: 2957 - RNA, 20 nt, Artificial Sequence
  source: /note="Description of Artificial Sequence: Synthetic oligonucleotide"
aacggucaagugcuggagag

SEQ ID NO: 2958 - RNA, 20 nt, Artificial Sequence
  source: /note="Description of Artificial Sequence: Synthetic oligonucleotide"
acggucaagugcuggagagu

SEQ ID NO: 2959 - RNA, 20 nt, Artificial Sequence
  source: /note="Description of Artificial Sequence: Synthetic oligonucleotide"
ccucauggcguguggacaga

SEQ ID NO: 2960 - RNA, 20 nt, Artificial Sequence
  source: /note="Description of Artificial Sequence: Synthetic oligonucleotide"
cucauggcguguggacagaa

SEQ ID NO: 2961 - RNA, 20 nt, Artificial Sequence
  source: /note="Description of Artificial Sequence: Synthetic oligonucleotide"
cuucccaggaagggguaugg

SEQ ID NO: 2962 - RNA, 20 nt, Artificial Sequence
  source: /note="Description of Artificial Sequence: Synthetic oligonucleotide"
cauaccccuuccugggaagg

SEQ ID NO: 2963 - RNA, 20 nt, Artificial Sequence
  source: /note="Description of Artificial Sequence: Synthetic oligonucleotide"
auaccccuuccugggaagga

SEQ ID NO: 2964 - RNA, 20 nt, Artificial Sequence
  source: /note="Description of Artificial Sequence: Synthetic oligonucleotide"
ccugggaaggagggauuaac

SEQ ID NO: 2965 - RNA, 20 nt, Artificial Sequence
  source: /note="Description of Artificial Sequence: Synthetic oligonucleotide"
ugcaauaacgcccacaaggg

SEQ ID NO: 2966 - RNA, 20 nt, Artificial Sequence
  source: /note="Description of Artificial Sequence: Synthetic oligonucleotide"
accccacaggagcagacgug

SEQ ID NO: 2967 - RNA, 20 nt, Artificial Sequence
  source: /note="Description of Artificial Sequence: Synthetic oligonucleotide"
gguggauguauccaggacuu

SEQ ID NO: 2968 - RNA, 20 nt, Artificial Sequence
  source: /note="Description of Artificial Sequence: Synthetic oligonucleotide"
ucaaaaacugacuuacgggc

SEQ ID NO: 2969 - RNA, 20 nt, Artificial Sequence
  source: /note="Description of Artificial Sequence: Synthetic oligonucleotide"
uauuucaaaaacugacuuac

SEQ ID NO: 2970 - RNA, 20 nt, Artificial Sequence
  source: /note="Description of Artificial Sequence: Synthetic oligonucleotide"
uugaaauauaaaagugguau

SEQ ID NO: 2971 - RNA, 20 nt, Artificial Sequence
  source: /note="Description of Artificial Sequence: Synthetic oligonucleotide"
caagagcuuauaaagucaua

SEQ ID NO: 2972 - RNA, 20 nt, Artificial Sequence
  source: /note="Description of Artificial Sequence: Synthetic oligonucleotide"
cccucacuucacugcaugau

SEQ ID NO: 2973 - RNA, 20 nt, Artificial Sequence
  source: /note="Description of Artificial Sequence: Synthetic oligonucleotide"
aacuggaggugacucuucca

SEQ ID NO: 2974 - RNA, 20 nt, Artificial Sequence
  source: /note="Description of Artificial Sequence: Synthetic oligonucleotide"
aaacaucccccugcaagaac

SEQ ID NO: 2975 - RNA, 20 nt, Artificial Sequence
  source: /note="Description of Artificial Sequence: Synthetic oligonucleotide"
gagucaccuccaguucuugc

SEQ ID NO: 2976 - RNA, 20 nt, Artificial Sequence
  source: /note="Description of Artificial Sequence: Synthetic oligonucleotide"
aagccacuucaauacaccuc

SEQ ID NO: 2977 - RNA, 20 nt, Artificial Sequence
  source: /note="Description of Artificial Sequence: Synthetic oligonucleotide"
agcugagacuuugcugccug

SEQ ID NO: 2978 - RNA, 20 nt, Artificial Sequence
  source: /note="Description of Artificial Sequence: Synthetic oligonucleotide"
uccaacacccucagagacca

SEQ ID NO: 2979 - RNA, 20 nt, Artificial Sequence
  source: /note="Description of Artificial Sequence: Synthetic oligonucleotide"
gccguggucucugagggugu

SEQ ID NO: 2980 - RNA, 20 nt, Artificial Sequence
  source: /note="Description of Artificial Sequence: Synthetic oligonucleotide"
ggaugugaacgaaaucaaau

SEQ ID NO: 2981 - RNA, 20 nt, Artificial Sequence
  source: /note="Description of Artificial Sequence: Synthetic oligonucleotide"
gacuguggcaagugcgauga

SEQ ID NO: 2982 - RNA, 20 nt, Artificial Sequence
  source: /note="Description of Artificial Sequence: Synthetic oligonucleotide"
ccaaaccaaggcagggcccc

SEQ ID NO: 2983 - RNA, 20 nt, Artificial Sequence
  source: /note="Description of Artificial Sequence: Synthetic oligonucleotide"
cugucuuccaaaccaaggca

SEQ ID NO: 2984 - RNA, 20 nt, Artificial Sequence
  source: /note="Description of Artificial Sequence: Synthetic oligonucleotide"
ccugccugucuuccaaacca

SEQ ID NO: 2985 - RNA, 20 nt, Artificial Sequence
  source: /note="Description of Artificial Sequence: Synthetic oligonucleotide"
ccugccuugguuuggaagac

SEQ ID NO: 2986 - RNA, 20 nt, Artificial Sequence
  source: /note="Description of Artificial Sequence: Synthetic oligonucleotide"
aggcaucccugaggcugaug

SEQ ID NO: 2987 - RNA, 20 nt, Artificial Sequence
  source: /note="Description of Artificial Sequence: Synthetic oligonucleotide"
guucugcagaagccucauuu

SEQ ID NO: 2988 - RNA, 20 nt, Artificial Sequence
  source: /note="Description of Artificial Sequence: Synthetic oligonucleotide"
ugcagaagccucauuugggu

SEQ ID NO: 2989 - RNA, 20 nt, Artificial Sequence
  source: /note="Description of Artificial Sequence: Synthetic oligonucleotide"
cagaagccucauuugggugg

SEQ ID NO: 2990 - RNA, 20 nt, Artificial Sequence
  source: /note="Description of Artificial Sequence: Synthetic oligonucleotide"
cauuggucauggguugguga

SEQ ID NO: 2991 - RNA, 20 nt, Artificial Sequence
  source: /note="Description of Artificial Sequence: Synthetic oligonucleotide"
acagcugaagacauugguca

SEQ ID NO: 2992 - RNA, 20 nt, Artificial Sequence
  source: /note="Description of Artificial Sequence: Synthetic oligonucleotide"
ugggcggaaagaugugugug

SEQ ID NO: 2993 - RNA, 20 nt, Artificial Sequence
  source: /note="Description of Artificial Sequence: Synthetic oligonucleotide"
aggccgugcgggcccuuuaa

SEQ ID NO: 2994 - RNA, 20 nt, Artificial Sequence
  source: /note="Description of Artificial Sequence: Synthetic oligonucleotide"
gccgcgccgccaugaugggg

SEQ ID NO: 2995 - RNA, 20 nt, Artificial Sequence
  source: /note="Description of Artificial Sequence: Synthetic oligonucleotide"
ccugccccggggugcacggg

SEQ ID NO: 2996 - RNA, 20 nt, Artificial Sequence
  source: /note="Description of Artificial Sequence: Synthetic oligonucleotide"
caccagcuaccucuaagccu

SEQ ID NO: 2997 - RNA, 20 nt, Artificial Sequence
  source: /note="Description of Artificial Sequence: Synthetic oligonucleotide"
agaagagauguccaaucccu

SEQ ID NO: 2998 - RNA, 20 nt, Artificial Sequence
  source: /note="Description of Artificial Sequence: Synthetic oligonucleotide"
cugaauguuggaagaaugcc

SEQ ID NO: 2999 - RNA, 20 nt, Artificial Sequence
  source: /note="Description of Artificial Sequence: Synthetic oligonucleotide"
gcuauuccaccccaaagccu

SEQ ID NO: 3000 - RNA, 20 nt, Artificial Sequence
  source: /note="Description of Artificial Sequence: Synthetic oligonucleotide"
agcagccugaacuccaagcc

SEQ ID NO: 3001 - RNA, 20 nt, Artificial Sequence
  source: /note="Description of Artificial Sequence: Synthetic oligonucleotide"
aauccaacaauugcaucugu

SEQ ID NO: 3002 - RNA, 20 nt, Artificial Sequence
  source: /note="Description of Artificial Sequence: Synthetic oligonucleotide"
uccucucccugagaggcccg

SEQ ID NO: 3003 - RNA, 20 nt, Artificial Sequence
  source: /note="Description of Artificial Sequence: Synthetic oligonucleotide"
cauucccccacaaugcagcg

SEQ ID NO: 3004 - RNA, 20 nt, Artificial Sequence
  source: /note="Description of Artificial Sequence: Synthetic oligonucleotide"
ccccggccaucagggguacc

SEQ ID NO: 3005 - RNA, 20 nt, Artificial Sequence
  source: /note="Description of Artificial Sequence: Synthetic oligonucleotide"
ccagguaccccugauggccg

SEQ ID NO: 3006 - RNA, 20 nt, Artificial Sequence
  source: /note="Description of Artificial Sequence: Synthetic oligonucleotide"
ccaaaagccuugguuccccc

SEQ ID NO: 3007 - RNA, 20 nt, Artificial Sequence
  source: /note="Description of Artificial Sequence: Synthetic oligonucleotide"
cuggcugccgccaugaccug

SEQ ID NO: 3008 - RNA, 20 nt, Artificial Sequence
  source: /note="Description of Artificial Sequence: Synthetic oligonucleotide"
aauggccuucaccuccucag

SEQ ID NO: 3009 - RNA, 20 nt, Artificial Sequence
  source: /note="Description of Artificial Sequence: Synthetic oligonucleotide"
uccaacaggagcacccuggg

SEQ ID NO: 3010 - RNA, 20 nt, Artificial Sequence
  source: /note="Description of Artificial Sequence: Synthetic oligonucleotide"
caggcggacccccaggcucu

SEQ ID NO: 3011 - RNA, 20 nt, Artificial Sequence
  source: /note="Description of Artificial Sequence: Synthetic oligonucleotide"
aauggagagugucugaacag

SEQ ID NO: 3012 - RNA, 20 nt, Artificial Sequence
  source: /note="Description of Artificial Sequence: Synthetic oligonucleotide"
ugagcccagaguacagaucu

SEQ ID NO: 3013 - RNA, 20 nt, Artificial Sequence
  source: /note="Description of Artificial Sequence: Synthetic oligonucleotide"
cuaguuguucaaaggggccu

SEQ ID NO: 3014 - RNA, 20 nt, Artificial Sequence
  source: /note="Description of Artificial Sequence: Synthetic oligonucleotide"
cagagugagagcggacauca

SEQ ID NO: 3015 - RNA, 20 nt, Artificial Sequence
  source: /note="Description of Artificial Sequence: Synthetic oligonucleotide"
ggguucugaggaaaacgcaa

SEQ ID NO: 3016 - RNA, 20 nt, Artificial Sequence
  source: /note="Description of Artificial Sequence: Synthetic oligonucleotide"
uucugaggaaaacgcaaugg

SEQ ID NO: 3017 - RNA, 20 nt, Artificial Sequence
  source: /note="Description of Artificial Sequence: Synthetic oligonucleotide"
gccgacuggccaccugcucc

SEQ ID NO: 3018 - RNA, 20 nt, Artificial Sequence
  source: /note="Description of Artificial Sequence: Synthetic oligonucleotide"
cacuuugcugcucagccgac

SEQ ID NO: 3019 - RNA, 20 nt, Artificial Sequence
  source: /note="Description of Artificial Sequence: Synthetic oligonucleotide"
guggcugcagagguuccuca

SEQ ID NO: 3020 - RNA, 20 nt, Artificial Sequence
  source: /note="Description of Artificial Sequence: Synthetic oligonucleotide"
gagggaaaaguugugcccaa

SEQ ID NO: 3021 - RNA, 20 nt, Artificial Sequence
  source: /note="Description of Artificial Sequence: Synthetic oligonucleotide"
gcuucacaagcucguagagg

SEQ ID NO: 3022 - RNA, 20 nt, Artificial Sequence
  source: /note="Description of Artificial Sequence: Synthetic oligonucleotide"
uggacuucuuagccaggccu

SEQ ID NO: 3023 - RNA, 20 nt, Artificial Sequence
  source: /note="Description of Artificial Sequence: Synthetic oligonucleotide"
gauggcuuuguugacagcag

SEQ ID NO: 3024 - RNA, 20 nt, Artificial Sequence
  source: /note="Description of Artificial Sequence: Synthetic oligonucleotide"
uugauggcuuuguugacagc

SEQ ID NO: 3025 - RNA, 20 nt, Artificial Sequence
  source: /note="Description of Artificial Sequence: Synthetic oligonucleotide"
cggcuucucggccaagggcc

SEQ ID NO: 3026 - RNA, 20 nt, Artificial Sequence
  source: /note="Description of Artificial Sequence: Synthetic oligonucleotide"
ggcuucucggccaagggccu

SEQ ID NO: 3027 - RNA, 20 nt, Artificial Sequence
  source: /note="Description of Artificial Sequence: Synthetic oligonucleotide"
cucaggauucuuagggguag

SEQ ID NO: 3028 - RNA, 20 nt, Artificial Sequence
  source: /note="Description of Artificial Sequence: Synthetic oligonucleotide"
ccucaggauucuuaggggua

SEQ ID NO: 3029 - RNA, 20 nt, Artificial Sequence
  source: /note="Description of Artificial Sequence: Synthetic oligonucleotide"
uccucaggauucuuaggggu

SEQ ID NO: 3030 - RNA, 20 nt, Artificial Sequence
  source: /note="Description of Artificial Sequence: Synthetic oligonucleotide"
cccuaccccuaagaauccug

SEQ ID NO: 3031 - RNA, 20 nt, Artificial Sequence
  source: /note="Description of Artificial Sequence: Synthetic oligonucleotide"
acccugccugccgugcccac

SEQ ID NO: 3032 - RNA, 20 nt, Artificial Sequence
  source: /note="Description of Artificial Sequence: Synthetic oligonucleotide"
uccagauccgccucccaccc

SEQ ID NO: 3033 - RNA, 20 nt, Artificial Sequence
  source: /note="Description of Artificial Sequence: Synthetic oligonucleotide"
cuugcuuccccccccaccgc

SEQ ID NO: 3034 - RNA, 20 nt, Artificial Sequence
  source: /note="Description of Artificial Sequence: Synthetic oligonucleotide"
gagacuggguccgucucuuc

SEQ ID NO: 3035 - RNA, 20 nt, Artificial Sequence
  source: /note="Description of Artificial Sequence: Synthetic oligonucleotide"
ugcgggagauccugaagaga

SEQ ID NO: 3036 - RNA, 20 nt, Artificial Sequence
  source: /note="Description of Artificial Sequence: Synthetic oligonucleotide"
agggcuuuugggcuuggccc

SEQ ID NO: 3037 - RNA, 20 nt, Artificial Sequence
  source: /note="Description of Artificial Sequence: Synthetic oligonucleotide"
gccgcccaucaucuuggcca

SEQ ID NO: 3038 - RNA, 20 nt, Artificial Sequence
  source: /note="Description of Artificial Sequence: Synthetic oligonucleotide"
gcccuggccaagaugauggg

SEQ ID NO: 3039 - RNA, 20 nt, Artificial Sequence
  source: /note="Description of Artificial Sequence: Synthetic oligonucleotide"
cgggcuuccagugagcugcc

SEQ ID NO: 3040 - RNA, 20 nt, Artificial Sequence
  source: /note="Description of Artificial Sequence: Synthetic oligonucleotide"
gugaagguccgaggggcugc

SEQ ID NO: 3041 - RNA, 20 nt, Artificial Sequence
  source: /note="Description of Artificial Sequence: Synthetic oligonucleotide"
gugagaugugaagguccgag

SEQ ID NO: 3042 - RNA, 20 nt, Artificial Sequence
  source: /note="Description of Artificial Sequence: Synthetic oligonucleotide"
ggugagaugugaagguccga

SEQ ID NO: 3043 - RNA, 20 nt, Artificial Sequence
  source: /note="Description of Artificial Sequence: Synthetic oligonucleotide"
ggaccuucacaucucacccu

SEQ ID NO: 3044 - RNA, 20 nt, Artificial Sequence
  source: /note="Description of Artificial Sequence: Synthetic oligonucleotide"
gguggcaacuucuuggccaa

SEQ ID NO: 3045 - RNA, 20 nt, Artificial Sequence
  source: /note="Description of Artificial Sequence: Synthetic oligonucleotide"
cgguggugguggcaacuucu

SEQ ID NO: 3046 - RNA, 20 nt, Artificial Sequence
  source: /note="Description of Artificial Sequence: Synthetic oligonucleotide"
ugcugccgggggcccuucau

SEQ ID NO: 3047 - RNA, 20 nt, Artificial Sequence
  source: /note="Description of Artificial Sequence: Synthetic oligonucleotide"
gcugccgggggcccuucaug

SEQ ID NO: 3048 - RNA, 20 nt, Artificial Sequence
  source: /note="Description of Artificial Sequence: Synthetic oligonucleotide"
ugcacccaucugaggguccc

SEQ ID NO: 3049 - RNA, 20 nt, Artificial Sequence
  source: /note="Description of Artificial Sequence: Synthetic oligonucleotide"
ucuucccguggugcccccca

SEQ ID NO: 3050 - RNA, 20 nt, Artificial Sequence
  source: /note="Description of Artificial Sequence: Synthetic oligonucleotide"
ccucaucaagaaggagccac

SEQ ID NO: 3051 - RNA, 20 nt, Artificial Sequence
  source: /note="Description of Artificial Sequence: Synthetic oligonucleotide"
cucagccugacgcccaucac

SEQ ID NO: 3052 - RNA, 20 nt, Artificial Sequence
  source: /note="Description of Artificial Sequence: Synthetic oligonucleotide"
ccuugaagggcaguucaguc

SEQ ID NO: 3053 - RNA, 20 nt, Artificial Sequence
  source: /note="Description of Artificial Sequence: Synthetic oligonucleotide"
ggcgaccgccagggccugcc

SEQ ID NO: 3054 - RNA, 20 nt, Artificial Sequence
  source: /note="Description of Artificial Sequence: Synthetic oligonucleotide"
cuuugaaaaccgcaaggccc

SEQ ID NO: 3055 - RNA, 20 nt, Artificial Sequence
  source: /note="Description of Artificial Sequence: Synthetic oligonucleotide"
ggcccuggccagccacgcac

SEQ ID NO: 3056 - RNA, 20 nt, Artificial Sequence
  source: /note="Description of Artificial Sequence: Synthetic oligonucleotide"
ggcaguucggcgugaccgag

SEQ ID NO: 3057 - RNA, 20 nt, Artificial Sequence
  source: /note="Description of Artificial Sequence: Synthetic oligonucleotide"
cacucgcucagugucucgau

SEQ ID NO: 3058 - RNA, 20 nt, Artificial Sequence
  source: /note="Description of Artificial Sequence: Synthetic oligonucleotide"
ccacucgcucagugucucga

SEQ ID NO: 3059 - RNA, 20 nt, Artificial Sequence
  source: /note="Description of Artificial Sequence: Synthetic oligonucleotide"
uggugaaggggcggccgccc

SEQ ID NO: 3060 - RNA, 20 nt, Artificial Sequence
  source: /note="Description of Artificial Sequence: Synthetic oligonucleotide"
ugcggaacuucuuggugaag

SEQ ID NO: 3061 - RNA, 20 nt, Artificial Sequence
  source: /note="Description of Artificial Sequence: Synthetic oligonucleotide"
acugcggaacuucuugguga

SEQ ID NO: 3062 - RNA, 20 nt, Artificial Sequence
  source: /note="Description of Artificial Sequence: Synthetic oligonucleotide"
accaagaaguuccgcagugc

SEQ ID NO: 3063 - RNA, 20 nt, Artificial Sequence
  source: /note="Description of Artificial Sequence: Synthetic oligonucleotide"
gucacugucacggccauggc

SEQ ID NO: 3064 - RNA, 20 nt, Artificial Sequence
  source: /note="Description of Artificial Sequence: Synthetic oligonucleotide"
gccgaccacggccaggcccc

SEQ ID NO: 3065 - RNA, 20 nt, Artificial Sequence
  source: /note="Description of Artificial Sequence: Synthetic oligonucleotide"
ucuaagguggagagggggac

SEQ ID NO: 3066 - RNA, 20 nt, Artificial Sequence
  source: /note="Description of Artificial Sequence: Synthetic oligonucleotide"
cuccagaugccuccgcagcc

SEQ ID NO: 3067 - RNA, 20 nt, Artificial Sequence
  source: /note="Description of Artificial Sequence: Synthetic oligonucleotide"
ccagaugccuccgcagcccg

SEQ ID NO: 3068 - RNA, 20 nt, Artificial Sequence
  source: /note="Description of Artificial Sequence: Synthetic oligonucleotide"
gaacuugacaagugaugucu

SEQ ID NO: 3069 - RNA, 20 nt, Artificial Sequence
  source: /note="Description of Artificial Sequence: Synthetic oligonucleotide"
agugccgcacccacucuucc

SEQ ID NO: 3070 - RNA, 20 nt, Artificial Sequence
  source: /note="Description of Artificial Sequence: Synthetic oligonucleotide"
ccucuccauccaggaagagu

SEQ ID NO: 3071 - RNA, 20 nt, Artificial Sequence
  source: /note="Description of Artificial Sequence: Synthetic oligonucleotide"
agugggugcggcacuuacag

SEQ ID NO: 3072 - RNA, 20 nt, Artificial Sequence
  source: /note="Description of Artificial Sequence: Synthetic oligonucleotide"
ccgccgcugucugugccugc

SEQ ID NO: 3073 - RNA, 20 nt, Artificial Sequence
  source: /note="Description of Artificial Sequence: Synthetic oligonucleotide"
cccgcaggcacagacagcgg

SEQ ID NO: 3074 - RNA, 20 nt, Artificial Sequence
  source: /note="Description of Artificial Sequence: Synthetic oligonucleotide"
ggcacagacagcggcggcag

SEQ ID NO: 3075 - RNA, 20 nt, Artificial Sequence
  source: /note="Description of Artificial Sequence: Synthetic oligonucleotide"
agacagagguggcacgagag

SEQ ID NO: 3076 - RNA, 20 nt, Artificial Sequence
  source: /note="Description of Artificial Sequence: Synthetic oligonucleotide"
gaagagggacaaggacacag

SEQ ID NO: 3077 - RNA, 20 nt, Artificial Sequence
  source: /note="Description of Artificial Sequence: Synthetic oligonucleotide"
ggggcgccgguuugagguuu

SEQ ID NO: 3078 - RNA, 20 nt, Artificial Sequence
  source: /note="Description of Artificial Sequence: Synthetic oligonucleotide"
uagugugcccggcccccaag

SEQ ID NO: 3079 - RNA, 20 nt, Artificial Sequence
  source: /note="Description of Artificial Sequence: Synthetic oligonucleotide"
guagugugcccggcccccaa

SEQ ID NO: 3080 - RNA, 20 nt, Artificial Sequence
  source: /note="Description of Artificial Sequence: Synthetic oligonucleotide"
uguagugugcccggccccca

SEQ ID NO: 3081 - RNA, 20 nt, Artificial Sequence
  source: /note="Description of Artificial Sequence: Synthetic oligonucleotide"
gggccgggcacacuacagcc

SEQ ID NO: 3082 - RNA, 20 nt, Artificial Sequence
  source: /note="Description of Artificial Sequence: Synthetic oligonucleotide"
ggccgggcacacuacagcca

SEQ ID NO: 3083 - RNA, 20 nt, Artificial Sequence
  source: /note="Description of Artificial Sequence: Synthetic oligonucleotide"
guccuccccugugaccagac

SEQ ID NO: 3084 - RNA, 20 nt, Artificial Sequence
  source: /note="Description of Artificial Sequence: Synthetic oligonucleotide"
uggcagccggucuggucaca

SEQ ID NO: 3085 - RNA, 20 nt, Artificial Sequence
  source: /note="Description of Artificial Sequence: Synthetic oligonucleotide"
ggcagccggucuggucacag

SEQ ID NO: 3086 - RNA, 20 nt, Artificial Sequence
  source: /note="Description of Artificial Sequence: Synthetic oligonucleotide"
agccggucuggucacagggg

SEQ ID NO: 3087 - RNA, 20 nt, Artificial Sequence
  source: /note="Description of Artificial Sequence: Synthetic oligonucleotide"
cacucccccgucuagcagcc

SEQ ID NO: 3088 - RNA, 20 nt, Artificial Sequence
  source: /note="Description of Artificial Sequence: Synthetic oligonucleotide"
agggcgaugucugccauccg

SEQ ID NO: 3089 - RNA, 20 nt, Artificial Sequence
  source: /note="Description of Artificial Sequence: Synthetic oligonucleotide"
gaaccagaacaggggucuuu

SEQ ID NO: 3090 - RNA, 20 nt, Artificial Sequence
  source: /note="Description of Artificial Sequence: Synthetic oligonucleotide"
gugugagaggauauucaugg

SEQ ID NO: 3091 - RNA, 20 nt, Artificial Sequence
  source: /note="Description of Artificial Sequence: Synthetic oligonucleotide"
aacacgcaccucgugagacc

SEQ ID NO: 3092 - RNA, 20 nt, Artificial Sequence
  source: /note="Description of Artificial Sequence: Synthetic oligonucleotide"
acacgcaccucgugagaccc

SEQ ID NO: 3093 - RNA, 20 nt, Artificial Sequence
  source: /note="Description of Artificial Sequence: Synthetic oligonucleotide"
gucguucaacccaggaacug

SEQ ID NO: 3094 - RNA, 20 nt, Artificial Sequence
  source: /note="Description of Artificial Sequence: Synthetic oligonucleotide"
ggucguucaacccaggaacu

SEQ ID NO: 3095 - RNA, 20 nt, Artificial Sequence
  source: /note="Description of Artificial Sequence: Synthetic oligonucleotide"
uggucguucaacccaggaac

SEQ ID NO: 3096 - RNA, 20 nt, Artificial Sequence
  source: /note="Description of Artificial Sequence: Synthetic oligonucleotide"
gcaagcaccguggcaugaug

SEQ ID NO: 3097 - RNA, 20 nt, Artificial Sequence
  source: /note="Description of Artificial Sequence: Synthetic oligonucleotide"
cuuccccugagcaagcaccg

SEQ ID NO: 3098 - RNA, 20 nt, Artificial Sequence
  source: /note="Description of Artificial Sequence: Synthetic oligonucleotide"
caugccacggugcuugcuca

SEQ ID NO: 3099 - RNA, 20 nt, Artificial Sequence
  source: /note="Description of Artificial Sequence: Synthetic oligonucleotide"
augccacggugcuugcucag

SEQ ID NO: 3100 - RNA, 20 nt, Artificial Sequence
  source: /note="Description of Artificial Sequence: Synthetic oligonucleotide"
cguggcauugugggcucagu

SEQ ID NO: 3101 - RNA, 20 nt, Artificial Sequence
  source: /note="Description of Artificial Sequence: Synthetic oligonucleotide"
cuuguuggcugcccccgaga

SEQ ID NO: 3102 - RNA, 20 nt, Artificial Sequence
  source: /note="Description of Artificial Sequence: Synthetic oligonucleotide"
uuaaaaggucaaucagcucc

SEQ ID NO: 3103 - RNA, 20 nt, Artificial Sequence
  source: /note="Description of Artificial Sequence: Synthetic oligonucleotide"
ggccacugaaaaaaguuaaa

SEQ ID NO: 3104 - RNA, 20 nt, Artificial Sequence
  source: /note="Description of Artificial Sequence: Synthetic oligonucleotide"
gaccuuuuaacuuuuuucag

SEQ ID NO: 3105 - RNA, 20 nt, Artificial Sequence
  source: /note="Description of Artificial Sequence: Synthetic oligonucleotide"
guacaucgauaaccaaaaug

SEQ ID NO: 3106 - RNA, 20 nt, Artificial Sequence
  source: /note="Description of Artificial Sequence: Synthetic oligonucleotide"
uuuaggccauggcugggagg

SEQ ID NO: 3107 - DNA, 20 bp, Unknown
  source: /note="Description of Unknown: target sequence"
gacatccgctgcgagttctg

SEQ ID NO: 3108 - DNA, 20 bp, Unknown
  source: /note="Description of Unknown: target sequence"
acggaggctaagcgtcgcaa

SEQ ID NO: 3109 - RNA, 74 nt, Artificial Sequence
  Synthetic polynucleotide
aacagcauagcaaguuaaaauaaggcuaguccguuaucaacuugaaaaaguggcaccgagucggugcuuuuuuu

SEQ ID NO: 3110 - RNA, 12 nt, Artificial Sequence
  source: /note="Description of Artificial Sequence: Synthetic oligonucleotide"
guuuuagagcua

SEQ ID NO: 3111 - RNA, 12 nt, Artificial Sequence
  source: /note="Description of Artificial Sequence: Synthetic oligonucleotide"
guuuaagagcua

SEQ ID NO: 3112 - RNA, 5 nt, Artificial Sequence
  source: /note="Description of Artificial Sequence: Synthetic oligonucleotide"
ugcug

SEQ ID NO: 3113 - RNA, 5 nt, Artificial Sequence
  source: /note="Description of Artificial Sequence: Synthetic oligonucleotide"
uuuug

SEQ ID NO: 3114 - RNA, 4 nt, Artificial Sequence
  source: /note="Description of Artificial Sequence: Synthetic oligonucleotide"
gaaa

SEQ ID NO: 3115 - RNA, 60 nt, Artificial Sequence
  source: /note="Description of Artificial Sequence: Synthetic oligonucleotide"
uagcaaguuaaaauaaggcuaguccguuaucaacuugaaaaaguggcaccgagucggugc

SEQ ID NO: 3116 - RNA, 60 nt, Artificial Sequence
  source: /note="Description of Artificial Sequence: Synthetic oligonucleotide"
uagcaaguuuaaauaaggcuaguccguuaucaacuugaaaaaguggcaccgagucggugc

SEQ ID NO: 3117 - RNA, 5 nt, Artificial Sequence
  source: /note="Description of Artificial Sequence: Synthetic oligonucleotide"
cagca

SEQ ID NO: 3118 - RNA, 5000 nt, Artificial Sequence
  source: /note="Description of Artificial Sequence: Synthetic polynucleotide"
  misc_feature (1)..(5000): /note="This sequence may encompass 50-5000 nucleotides"
aaaaaaaaaaaaaaaaaaaaaaaaaaaaaaaaaaaaaaaaaaaaaaaaaaaaaaaaaaaaaaaaaaaaaaaaaaaaaaaaaaaaaaaaaaaaaaaaaaaaaaaaaaaaaaaaaaaaaaaaaaaaaaaaaaaaaaaaaaaaaaaaaaaaaaaaaaaaaaaaaaaaaaaaaaaaaaaaaaaaaaaaaaaaaaaaaaaaaaaaaaaaaaaaaaaaaaaaaaaaaaaaaaaaaaaaaaaaaaaaaaaaaaaaaaaaaaaaaaaaaaaaaaaaaaaaaaaaaaaaaaaaaaaaaaaaaaaaaaaaaaaaaaaaaaaaaaaaaaaaaaaaaaaaaaaaaaaaaaaaaaaaaaaaaaaaaaaaaaaaaaaaaaaaaaaaaaaaaaaaaaaaaaaaaaaaaaaaaaaaaaaaaaaaaaaaaaaaaaaaaaaaaaaaaaaaaaaaaaaaaaaaaaaaaaaaaaaaaaaaaaaaaaaaaaaaaaaaaaaaaaaaaaaaaaaaaaaaaaaaaaaaaaaaaaaaaaaaaaaaaaaaaaaaaaaaaaaaaaaaaaaaaaaaaaaaaaaaaaaaaaaaaaaaaaaaaaaaaaaaaaaaaaaaaaaaaaaaaaaaaaaaaaaaaaaaaaaaaaaaaaaaaaaaaaaaaaaaaaaaaaaaaaaaaaaaaaaaaaaaaaaaaaaaaaaaaaaaaaaaaaaaaaaaaaaaaaaaaaaaaaaaaaaaaaaaaaaaaaaaaaaaaaaaaaaaaaaaaaaaaaaaaaaaaaaaaaaaaaaaaaaaaaaaaaaaaaaaaaaaaaaaaaaaaaaaaaaaaaaaaaaaaaaaaaaaaaaaaaaaaaaaaaaaaaaaaaaaaaaaaaaaaaaaaaaaaaaaaaaaaaaaaaaaaaaaaaaaaaaaaaaaaaaaaaaaaaaaaaaaaaaaaaaaaaaaaaaaaaaaaaaaaaaaaaaaaaaaaaaaaaaaaaaaaaaaaaaaaaaaaaaaaaaaaaaaaaaaaaaaaaaaaaaaaaaaaaaaaaaaaaaaaaaaaaaaaaaaaaaaaaaaaaaaaaaaaaaaaaaaaaaaaaaaaaaaaaaaaaaaaaaaaaaaaaaaaaaaaaaaaaaaaaaaaaaaaaaaaaaaaaaaaaaaaaaaaaaaaaaaaaaaaaaaaaaaaaaaaaaaaaaaaaaaaaaaaaaaaaaaaaaaaaaaaaaaaaaaaaaaaaaaaaaaaaaaaaaaaaaaaaaaaaaaaaaaaaaaaaaaaaaaaaaaaaaaaaaaaaaaaaaaaaaaaaaaaaaaaaaaaaaaaaaaaaaaaaaaaaaaaaaaaaaaaaaaaaaaaaaaaaaaaaaaaaaaaaaaaaaaaaaaaaaaaaaaaaaaaaaaaaaaaaaaaaaaaaaaaaaaaaaaaaaaaaaaaaaaaaaaaaaaaaaaaaaaaaaaaaaaaaaaaaaaaaaaaaaaaaaaaaaaaaaaaaaaaaaaaaaaaaaaaaaaaaaaaaaaaaaaaaaaaaaaaaaaaaaaaaaaaaaaaaaaaaaaaaaaaaaaaaaaaaaaaaaaaaaaaaaaaaaaaaaaaaaaaaaaaaaaaaaaaaaaaaaaaaaaaaaaaaaaaaaaaaaaaaaaaaaaaaaaaaaaaaaaaaaaaaaaaaaaaaaaaaaaaaaaaaaaaaaaaaaaaaaaaaaaaaaaaaaaaaaaaaaaaaaaaaaaaaaaaaaaaaaaaaaaaaaaaaaaaaaaaaaaaaaaaaaaaaaaaaaaaaaaaaaaaaaaaaaaaaaaaaaaaaaaaaaaaaaaaaaaaaaaaaaaaaaaaaaaaaaaaaaaaaaaaaaaaaaaaaaaaaaaaaaaaaaaaaaaaaaaaaaaaaaaaaaaaaaaaaaaaaaaaaaaaaaaaaaaaaaaaaaaaaaaaaaaaaaaaaaaaaaaaaaaaaaaaaaaaaaaaaaaaaaaaaaaaaaaaaaaaaaaaaaaaaaaaaaaaaaaaaaaaaaaaaaaaaaaaaaaaaaaaaaaaaaaaaaaaaaaaaaaaaaaaaaaaaaaaaaaaaaaaaaaaaaaaaaaaaaaaaaaaaaaaaaaaaaaaaaaaaaaaaaaaaaaaaaaaaaaaaaaaaaaaaaaaaaaaaaaaaaaaaaaaaaaaaaaaaaaaaaaaaaaaaaaaaaaaaaaaaaaaaaaaaaaaaaaaaaaaaaaaaaaaaaaaaaaaaaaaaaaaaaaaaaaaaaaaaaaaaaaaaaaaaaaaaaaaaaaaaaaaaaaaaaaaaaaaaaaaaaaaaaaaaaaaaaaaaaaaaaaaaaaaaaaaaaaaaaaaaaaaaaaaaaaaaaaaaaaaaaaaaaaaaaaaaaaaaaaaaaaaaaaaaaaaaaaaaaaaaaaaaaaaaaaaaaaaaaaaaaaaaaaaaaaaaaaaaaaaaaaaaaaaaaaaaaaaaaaaaaaaaaaaaaaaaaaaaaaaaaaaaaaaaaaaaaaaaaaaaaaaaaaaaaaaaaaaaaaaaaaaaaaaaaaaaaaaaaaaaaaaaaaaaaaaaaaaaaaaaaaaaaaaaaaaaaaaaaaaaaaaaaaaaaaaaaaaaaaaaaaaaaaaaaaaaaaaaaaaaaaaaaaaaaaaaaaaaaaaaaaaaaaaaaaaaaaaaaaaaaaaaaaaaaaaaaaaaaaaaaaaaaaaaaaaaaaaaaaaaaaaaaaaaaaaaaaaaaaaaaaaaaaaaaaaaaaaaaaaaaaaaaaaaaaaaaaaaaaaaaaaaaaaaaaaaaaaaaaaaaaaaaaaaaaaaaaaaaaaaaaaaaaaaaaaaaaaaaaaaaaaaaaaaaaaaaaaaaaaaaaaaaaaaaaaaaaaaaaaaaaaaaaaaaaaaaaaaaaaaaaaaaaaaaaaaaaaaaaaaaaaaaaaaaaaaaaaaaaaaaaaaaaaaaaaaaaaaaaaaaaaaaaaaaaaaaaaaaaaaaaaaaaaaaaaaaaaaaaaaaaaaaaaaaaaaaaaaaaaaaaaaaaaaaaaaaaaaaaaaaaaaaaaaaaaaaaaaaaaaaaaaaaaaaaaaaaaaaaaaaaaaaaaaaaaaaaaaaaaaaaaaaaaaaaaaaaaaaaaaaaaaaaaaaaaaaaaaaaaaaaaaaaaaaaaaaaaaaaaaaaaaaaaaaaaaaaaaaaaaaaaaaaaaaaaaaaaaaaaaaaaaaaaaaaaaaaaaaaaaaaaaaaaaaaaaaaaaaaaaaaaaaaaaaaaaaaaaaaaaaaaaaaaaaaaaaaaaaaaaaaaaaaaaaaaaaaaaaaaaaaaaaaaaaaaaaaaaaaaaaaaaaaaaaaaaaaaaaaaaaaaaaaaaaaaaaaaaaaaaaaaaaaaaaaaaaaaaaaaaaaaaaaaaaaaaaaaaaaaaaaaaaaaaaaaaaaaaaaaaaaaaaaaaaaaaaaaaaaaaaaaaaaaaaaaaaaaaaaaaaaaaaaaaaaaaaaaaaaaaaaaaaaaaaaaaaaaaaaaaaaaaaaaaaaaaaaaaaaaaaaaaaaaaaaaaaaaaaaaaaaaaaaaaaaaaaaaaaaaaaaaaaaaaaaaaaaaaaaaaaaaaaaaaaaaaaaaaaaaaaaaaaaaaaaaaaaaaaaaaaaaaaaaaaaaaaaaaaaaaaaaaaaaaaaaaaaaaaaaaaaaaaaaaaaaaaaaaaaaaaaaaaaaaaaaaaaaaaaaaaaaaaaaaaaaaaaaaaaaaaaaaaaaaaaaaaaaaaaaaaaaaaaaaaaaaaaaaaaaaaaaaaaaaaaaaaaaaaaaaaaaaaaaaaaaaaaaaaaaaaaaaaaaaaaaaaaaaaaaaaaaaaaaaaaaaaaaaaaaaaaaaaaaaaaaaaaaaaaaaaaaaaaaaaaaaaaaaaaaaaaaaaaaaaaaaaaaaaaaaaaaaaaaaaaaaaaaaaaaaaaaaaaaaaaaaaaaaaaaaaaaaaaaaaaaaaaaaaaaaaaaaaaaaaaaaaaaaaaaaaaaaaaaaaaaaaaaaaaaaaaaaaaaaaaaaaaaaaaaaaaaaaaaaaaaaaaaaaaaaaaaaaaaaaaaaaaaaaaaaaaaaaaaaaaaaaaaaaaaaaaaaaaaaaaaaaaaaaaaaaaaaaaaaaaaaaaaaaaaaaaaaaaaaaaaaaaaaaaaaaaaaaaaaaaaaaaaaaaaaaaaaaaaaaaaaaaaaaaaaaaaaaaaaaaaaaaaaaaaaaaaaaaaaaaaaaaaaaaaaaaaaaaaaaaaaaaaaaaaaaaaaaaaaaaaaaaaaaaaaaaaaaaaaaaaaaaaaaaaaaaaaaaaaaaaaaaaaaaaaaaaaaaaaaaaaaaaaaaaaaaaaaaaaaaaaaaaaaaaaaaaaaaaaaaaaaaaaaaaaaaaaaaaaaaaaaaaaaaaaaaaaaaaaaaaaaaaaaaaaaaaaaaaaaaaaaaaaaaaaaaaaaaaaaaaaaaaaaaaaaaaaaaaaaaaaaaaaaaaaaaaaaaaaaaaaaaaaaaaaaaaaaaaaaaaaaaaaaaaaaaaaaaaaaaaaaaaaaaaaaaaaaaaaaaaaaaaaaaaaaaaaaaaaaaaaaaaaaaaaaaaaaaaaaaaaaaaaaaaaaaaaaaaaaaaaaaaaaaaaaaaaaaaaaaaaaaaaaaaaaaaaaaaaaaaaaaaaaaaaaaaaaaaaaaaaaaaaaaaaaaaaaaaaaaaaaaaaaaaaaaaaaaaaaaaaaaaaaaaaaaaaaaaaaaaaaaaaaaaaaaaaaaaaaaaaaaaaaaaaaaaaaaaaaaaaaaaaaaaaaaaaaaaaaaaaaaaaaaaaaaaaaaaaaaaaaaaaaaaaaaaaaaaaaaaaaaaaaaaaaaaaaaaaaaaaaaaaaaaaaaaaaaaaaaaaaaaaaaaaaaaaaaaaaaaaaaaaaaaaaaaaaaaaaaaaaaaaaaaaaaaaaaaaaaaaaaaaaaaaaaaaaaaaaaaaaaaaaaaaaaaaaaaaaaaaaaaaaaaaaaaaaaaaaaaaaaaaaaaaaaaaaaaaaaaaaaaaaaaaaaaaaaaaaaaaaaaaaaaaaaaaaaaaaaaaaaaaaaaaaaaaaaaaaaaaaaaaaaaaaaaaaaaaaaaaaaaaaaaaaaaaaaaaaaaaaaaaaaaaaaaaaaaaaa

SEQ ID NO: 3119 - RNA, 13 nt, Artificial Sequence
  source: /note="Description of Artificial Sequence: Synthetic oligonucleotide"
uagcaaguuaaaa

SEQ ID NO: 3120 - RNA, 13 nt, Artificial Sequence
  source: /note="Description of Artificial Sequence: Synthetic oligonucleotide"
uagcaaguuuaaa

SEQ ID NO: 3121 - RNA, 47 nt, Artificial Sequence
  source: /note="Description of Artificial Sequence: Synthetic oligonucleotide"
uaaggcuaguccguuaucaacuugaaaaaguggcaccgagucggugc

SEQ ID NO: 3122 - RNA, 51 nt, Artificial Sequence
  source: /note="Description of Artificial Sequence: Synthetic oligonucleotide"
uaaggcuaguccguuaucaacuugaaaaaguggcaccgagucggugcuuuu

SEQ ID NO: 3123 - RNA, 76 nt, Artificial Sequence
  source: /note="Description of Artificial Sequence: Synthetic oligonucleotide"
guuuuagagcuagaaauagcaaguuaaaauaaggcuaguccguuaucaacuugaaaaaguggcaccgagucggugc

SEQ ID NO: 3124 - RNA, 76 nt, Artificial Sequence
  source: /note="Description of Artificial Sequence: Synthetic oligonucleotide"
guuuaagagcuagaaauagcaaguuuaaauaaggcuaguccguuaucaacuugaaaaaguggcaccgagucggugc

SEQ ID NO: 3125 - RNA, 86 nt, Artificial Sequence
  source: /note="Description of Artificial Sequence: Synthetic oligonucleotide"
guuuuagagcuaugcuggaaacagcauagcaaguuaaaauaaggcuaguccguuaucaacuugaaaaaguggcaccgagucggugc

SEQ ID NO: 3126 - RNA, 86 nt, Artificial Sequence
  source: /note="Description of Artificial Sequence: Synthetic oligonucleotide"
guuuaagagcuaugcuggaaacagcauagcaaguuuaaauaaggcuaguccguuaucaacuugaaaaaguggcaccgagucggugc

SEQ ID NO: 3127 - RNA, 17 nt, Artificial Sequence
  source: /note="Description of Artificial Sequence: Synthetic oligonucleotide"
guuuuagagcuaugcug

SEQ ID NO: 3128 - RNA, 17 nt, Artificial Sequence
  source: /note="Description of Artificial Sequence: Synthetic oligonucleotide"
guuuaagagcuaugcug

SEQ ID NO: 3129 - RNA, 22 nt, Artificial Sequence
  source: /note="Description of Artificial Sequence: Synthetic oligonucleotide"
guuuuagagcuaugcuguuuug

SEQ ID NO: 3130 - RNA, 22 nt, Artificial Sequence
  source: /note="Description of Artificial Sequence: Synthetic oligonucleotide"
guuuaagagcuaugcuguuuug

SEQ ID NO: 3131 - RNA, 65 nt, Artificial Sequence
  source: /note="Description of Artificial Sequence: Synthetic oligonucleotide"
cagcauagcaaguuaaaauaaggcuaguccguuaucaacuugaaaaaguggcaccgagucggugc

SEQ ID NO: 3132 - RNA, 65 nt, Artificial Sequence
  Synthetic polynucleotide
cagcauagcaaguuuaaauaaggcuaguccguuaucaacuugaaaaaguggcaccgagucggugc

SEQ ID NO: 3133 - protein, 1368 aa, Streptococcus pyogenes [sequence omitted]

SEQ ID NO: 3134 - protein, 7 aa, Simian virus 40
PKKKRKV

SEQ ID NO: 3135 - protein, 16 aa, Unknown
  source: /note="Description of Unknown: Nucleoplasmin bipartite NLS sequence"
KRPAATKKAGQAKKKK

SEQ ID NO: 3136 - protein, 9 aa, Unknown
  source: /note="Description of Unknown: C-myc NLS sequence"
PAAKRVKLD

SEQ ID NO: 3137 - protein, 11 aa, Unknown
  source: /note="Description of Unknown: C-myc NLS sequence"
RQRRNELKRSP

SEQ ID NO: 3138 - protein, 38 aa, Homo sapiens
NQSSNFGPMKGGNFGGRSSGPYGGGGQYFAKPRNQGGY

SEQ ID NO: 3139 - protein, 42 aa, Unknown
  source: /note="Description of Unknown: IBB domain from importin-alpha sequence"
RMRIZFKNKGKDTAELRRRRVEVSVELRKAKKDEQILKRRNV

SEQ ID NO: 3140 - protein, 8 aa, Unknown
  source: /note="Description of Unknown: Myoma T protein sequence"
VSRKRPRP

SEQ ID NO: 3141 - protein, 8 aa, Unknown
  source: /note="Description of Unknown: Myoma T protein sequence"
PPKKARED

SEQ ID NO: 3142 - protein, 8 aa, Homo sapiens
PQPKKKPL

SEQ ID NO: 3143 - protein, 12 aa, Mus musculus
SALIKKKKKMAP

SEQ ID NO: 3144 - protein, 5 aa, Influenza virus
DRLRR

SEQ ID NO: 3145 - protein, 7 aa, Influenza virus
PKQKKRK

SEQ ID NO: 3146 - protein, 10 aa, Hepatitis delta virus
RKLKKKIKKL

SEQ ID NO: 3147 - protein, 10 aa, Mus musculus
REKKKFLKRR

SEQ ID NO: 3148 - protein, 20 aa, Homo sapiens
KRKGDEVDGVDEVAKKKSKK

SEQ ID NO: 3149 - protein, 17 aa, Homo sapiens
RKCLQAGMNLEARKTKK

SEQ ID NO: 3150 - DNA, 4107 bp, Artificial Sequence
  source: /note="Description of Artificial Sequence: Synthetic polynucleotide"
atggataaaaagtacagcatcgggctggacatcggtacaaactcagtggggtgggccgtgattacggacgagtacaaggtaccctccaaaaaatttaaagtgctgggtaacacggacagacactctataaagaaaaatcttattggagccttgctgttcgactcaggcgagacagccgaagccacaaggttgaagcggaccgccaggaggcggtataccaggagaaagaaccgcatatgctacctgcaagaaatcttcagtaacgagatggcaaaggttgacgatagctttttccatcgcctggaagaatcctttcttgttgaggaagacaagaagcacgaacggcaccccatctttggcaatattgtcgacgaagtggcatatcacgaaaagtacccgactatctaccacctcaggaagaagctggtggactctaccgataaggcggacctcagacttatttatttggcactcgcccacatgattaaatttagaggacatttcttgatcgagggcgacctgaacccggacaacagtgacgtcgataagctgttcatccaacttgtgcagacctacaatcaactgttcgaagaaaaccctataaatgcttcaggagtcgacgctaaagcaatcctgtccgcgcgcctctcaaaatctagaagacttgagaatctgattgctcagttgcccggggaaaagaaaaatggattgtttggcaacctgatcgccctcagtctcggactgaccccaaatttcaaaagtaacttcgacctggccgaagacgctaagctccagctgtccaaggacacatacgatgacgacctcgacaatctgctggcccagattggggatcagtacgccgatctctttttggcagcaaagaacctgtccgacgccatcctgttgagcgatatcttgagagtgaacaccgaaattactaaagcaccccttagcgcatctatgatcaagcggtacgacgagcatcatcaggatctgaccctgctgaaggctcttgtgaggcaacagctccccgaaaaatacaaggaaatcttctttgaccagagcaaaaacggctacgctggctatatagatggtggggccagtcaggaggaattctataaattcatcaagcccattctcgagaaaatggacggcacagaggagttgctggtcaaacttaacagggaggacctgctgcggaagcagcggacctttgacaacgggtctatcccccaccagattcatctgggcgaactgcacgcaatcctgaggaggcaggaggatttttatccttttcttaaagataaccgcgagaaaatagaaaagattcttacattcaggatcccgtactacgtgggacctctcgcccggggcaattcacggtttgcctggatgacaaggaagtcagaggagactattacaccttggaacttcgaagaagtggtggacaagggtgcatctgcccagtctttcatcgagcggatgacaaattttgacaagaacctccctaatgagaaggtgctgcccaaacattctctgctctacgagtactttaccgtctacaatgaactgactaaagtcaagtacgtcaccgagggaatgaggaagccggcattccttagtggagaacagaagaaggcgattgtagacctgttgttcaagaccaacaggaaggtgactgtgaagcaacttaaagaagactactttaagaagatcgaatgttttgacagtgtggaaatttcaggggttgaagaccgcttcaatgcgtcattggggacttaccatgatcttctcaagatcataaaggacaaagacttcctggacaacgaagaaaatgaggatattctcgaagacatcgtcctcaccctgaccctgttcgaagacagggaaatgatagaagagcgcttgaaaacctatgcccacctcttcgacgataaagttatgaagcagctgaagcgcaggagatacacaggatggggaagattgtcaaggaagctgatcaatggaattagggataaacagagtggcaagaccatactggatttcctcaaatctgatggcttcgccaataggaacttcatgcaactgattcacgatgactctcttaccttcaaggaggacattcaaaaggctcaggtgagcgggcagggagactcccttcatgaacacatcgcgaatttggcaggttcccccgctattaaaaagggcatccttcaaactgtcaaggtggtggatgaattggtcaaggtaatgggcagacataagccagaaaatattgtgatcgagatggcccgcgaaaaccagaccacacagaagggccagaaaaatagtagagagcggatgaagaggatcgaggagggcatcaaagagctgggatctcagattctcaaagaacaccccgtagaaaacacacagctgcagaacgaaaaattgtacttgtactatctgcagaacggcagagacatgtacgtcgaccaagaacttgatattaatagactgtccgactatgacgtagaccatatcgtgccccagtccttcctgaaggacgactccattgataacaaagtcttgacaagaagcgacaagaacaggggtaaaagtgataatgtgcctagcgaggaggtggtgaaaaaaatgaagaactactggcgacagctgcttaatgcaaagctcattacacaacggaagttcgataatctgacgaaagcagagagaggtggcttgtctgagttggacaaggcagggtttattaagcggcagctggtggaaactaggcagatcacaaagcacgtggcgcagattttggacagccggatgaacacaaaatacgacgaaaatgataaactgatacgagaggtcaaagttatcacgctgaaaagcaagctggtgtccgattttcggaaagacttccagttctacaaagttcgcgagattaataactaccatcatgctcacgatgcgtacctgaacgctgttgtcgggaccgccttgataaagaagtacccaaagctggaatccgagttcgtatacggggattacaaagtgtacgatgtgaggaaaatgatagccaagtccgagcaggagattggaaaggccacagctaagtacttcttttattctaacatcatgaatttttttaagacggaaattaccctggccaacggagagatcagaaagcggccccttatagagacaaatggtgaaacaggtgaaatcgtctgggataagggcagggatttcgctactgtgaggaaggtgctgagtatgccacaggtaaatatcgtgaaaaaaaccgaagtacagaccggaggattttccaaggaaagcattttgcctaaaagaaactcagacaagctcatcgcccgcaagaaagattgggaccctaagaaatacgggggatttgactcacccaccgtagcctattctgtgctggtggtagctaaggtggaaaaaggaaagtctaagaagctgaagtccgtgaaggaactcttgggaatcactatcatggaaagatcatcctttgaaaagaaccctatcgatttcctggaggctaagggttacaaggaggtcaagaaagacctcatcattaaactgccaaaatactctctcttcgagctggaaaatggcaggaagagaatgttggccagcgccggagagctgcaaaagggaaacgagcttgctctgccctccaaatatgttaattttctctatctcgcttcccactatgaaaagctgaaagggtctcccgaagataacgagcagaagcagctgttcgtcgaacagcacaagcactatctggatgaaataatcgaacaaataagcgagttcagcaaaagggttatcctggcggatgctaatttggacaaagtactgtctgcttataacaagcaccgggataagcctattagggaacaagccgagaatataattcacctctttacactcacgaatctcggagcccccgccgccttcaaatactttgatacgactatcgaccggaaacggtataccagtaccaaagaggtcctcgatgccaccctcatccaccagtcaattactggcctgtacgaaacacggatcgacctctctcaactgggcggcgactag

SEQ ID NO: 3151 - DNA, 4164 bp, Artificial Sequence
  source: /note="Description of Artificial Sequence: Synthetic polynucleotide"
atggctccgaagaaaaagcgtaaagtggataaaaaatacagcattggtctggacattggcacgaactcagtgggttgggcggtcatcacggatgaatataaggtcccgtcaaaaaagttcaaagtgctgggcaacaccgatcgccattcgattaaaaagaatctgatcggcgcgctgctgtttgatagcggtgaaaccgcggaagcaacgcgtctgaaacgtaccgcacgtcgccgttacacgcgccgtaaaaatcgtattctgtatctgcaggaaatctttagcaacgaaatggcgaaagttgatgactcatttttccaccgcctggaagaatcgtttctggtcgaagaagacaaaaagcatgaacgtcacccgattttcggtaatatcgttgatgaagtcgcgtaccatgaaaaatatccgacgatttaccatctgcgtaaaaaactggtggattcaaccgacaaagccgatctgcgcctgatttacctggcactggctcatatgatcaaatttcgtggccacttcctgattgaaggtgacctgaacccggataactctgacgttgataagctgttcatccagctggtccaaacctataatcagctgttcgaagaaaacccgatcaatgcaagtggcgttgatgcgaaggccattctgtccgctcgcctgagtaaatcccgccgtctggaaaacctgattgcacaactgccgggcgaaaagaaaaacggcctgtttggtaatctgatcgctctgtcactgggtctgacgccgaactttaaatcgaatttcgacctggcagaagatgctaagctgcagctgagcaaagatacctacgatgacgatctggacaacctgctggcgcaaattggtgaccagtatgccgacctgtttctggcggccaaaaatctgtcagatgccattctgctgtcggacatcctgcgcgtgaacaccgaaatcacgaaagcgccgctgtcagcctcgatgattaaacgctacgatgaacatcaccaggacctgaccctgctgaaagcactggttcgtcagcaactgccggaaaagtacaaggaaattttctttgaccaatctaagaacggctatgcaggttacatcgatggcggtgctagtcaggaagaattctacaagttcatcaagccgatcctggaaaaaatggatggcacggaagaactgctggtgaaactgaatcgtgaagatctgctgcgtaaacaacgcacctttgacaacggcagcattccgcatcagatccacctgggtgaactgcatgcgattctgcgccgtcaggaagatttttatccgttcctgaaagacaaccgtgaaaaaattgaaaagatcctgacgtttcgcatcccgtattacgttggcccgctggcgcgtggtaatagccgcttcgcctggatgacccgcaaatctgaagaaaccattacgccgtggaactttgaagaagtggttgataaaggtgcaagcgctcagtcttttatcgaacgtatgaccaatttcgataaaaacctgccgaatgaaaaggtcctgccgaaacatagcctgctgtatgaatactttaccgtgtacaacgaactgacgaaagtgaagtatgttaccgaaggcatgcgcaaaccggcgtttctgtctggtgaacagaaaaaagccattgtggatctgctgttcaagaccaatcgtaaagttacggtcaaacagctgaaggaagattacttcaaaaagatcgaagaattcgacagcgtggaaatttctggcgttgaagatcgtttcaacgccagtctgggtacctatcatgacctgctgaagatcatcaaggacaaggattttctggataacgaagaaaatgaagacattctggaagatatcgtgctgaccctgacgctgttcgaagatcgtgaaatgattgaagaacgcctgaaaacgtacgcacacctgtttgacgataaagttatgaagcagctgaaacgccgtcgctataccggctggggtcgtctgtctcgcaaactgattaatggcatccgcgataagcaaagtggtaaaacgattctggatttcctgaaatccgacggctttgccaaccgtaatttcatgcagctgatccatgacgatagtctgacctttaaggaagacattcagaaagcacaagtgtcaggccagggtgattcgctgcatgaacacattgcgaacctggccggctccccggctattaaaaagggtatcctgcagaccgtcaaagtcgtggatgaactggtgaaggttatgggccgtcacaaaccggaaaacattgtgatcgaaatggcgcgcgaaaatcagaccacgcaaaagggtcagaaaaactcacgtgaacgcatgaagcgcattgaagaaggcatcaaagaactgggttcgcagattctgaaagaacatccggttgaaaacacccagctgcaaaatgaaaaactgtacctgtattacctgcaaaatggccgtgacatgtatgtcgatcaggaactggacatcaaccgcctgagcgactatgatgtcgaccacattgtgccgcagagctttctgaaggacgattctatcgataataaagtgctgacccgttctgataagaaccgcggtaaaagcgacaatgttccgtctgaagaagttgtcaaaaagatgaagaactactggcgtcaactgctgaatgcgaagctgattacgcagcgtaaattcgataacctgaccaaggcggaacgcggcggtctgagtgaactggataaggccggctttatcaaacgtcaactggtggaaacccgccagattacgaaacatgttgcccagatcctggattcccgcatgaacacgaaatatgacgaaaatgataagctgattcgtgaagtcaaagtgatcaccctgaagagtaagctggtgtccgatttccgtaaggactttcagttctacaaagttcgcgaaattaacaattaccatcacgcacacgatgcttatctgaatgcagtggttggcaccgctctgatcaaaaagtatccgaaactggaaagcgaatttgtgtatggtgattacaaagtctatgacgtgcgcaagatgattgcgaaaagtgaacaggaaatcggcaaggcgaccgccaagtactttttctattccaacatcatgaactttttcaagaccgaaatcacgctggcaaatggcgaaattcgtaaacgcccgctgatcgaaaccaacggcgaaacgggtgaaattgtgtgggataaaggtcgtgacttcgcgaccgttcgcaaagtcctgtcaatgccgcaagtgaatatcgttaaaaagaccgaagttcagacgggcggttttagtaaagaatccatcctgccgaagcgtaactcggataaactgattgcgcgcaaaaaggattgggacccgaaaaagtacggcggttttgatagtccgaccgttgcatattccgtcctggtcgtggctaaagttgaaaaaggcaagagtaaaaagctgaagtccgtcaaagaactgctgggtattaccatcatggaacgtagctcttttgaaaagaacccgattgacttcctggaagccaagggctacaaagaagtgaaaaaggatctgattatcaagctgccgaaatattcgctgttcgaactggaaaacggtcgtaaacgcatgctggcaagcgctggcgaactgcagaagggtaatgaactggcactgccgtctaaatatgtgaactttctgtacctggctagccattatgaaaaactgaagggttctccggaagataacgaacagaagcaactgttcgttgaacaacataaacactacctggatgaaatcatcgaacagatctcagaattctcgaaacgcgtcattctggcggatgccaatctggacaaagtgctgagcgcgtataacaagcatcgtgataaaccgattcgcgaacaggccgaaaatattatccacctgtttaccctgacgaacctgggcgcaccggcagcttttaaatacttcgataccacgatcgaccgtaagcgctataccagcacgaaagaagttctggatgctaccctgattcatcagtcaatcaccggtctgtatgaaacgcgtattgacctgagccaactgggcggtgatagccgtgccgaccatcaccatcaccatcactaatag

SEQ ID NO: 3152 - RNA, 74 nt, Artificial Sequence; identical to SEQ ID NO: 3109
  source: /note="Description of Artificial Sequence: Synthetic oligonucleotide"

SEQ ID NO: 3153 - RNA, 74 nt, Artificial Sequence
  source: /note="Description of Artificial Sequence: Synthetic oligonucleotide"
aacagcauagcaaguuuaaauaaggcuaguccguuaucaacuugaaaaaguggcaccgagucggugcuuuuuuu

SEQ ID NO: 3154 - RNA, 16 nt, Artificial Sequence
  source: /note="Description of Artificial Sequence: Synthetic oligonucleotide"
guuuuagagcuaugcu

SEQ ID NO: 3155 - RNA, 90 nt, Artificial Sequence
  source: /note="Description of Artificial Sequence: Synthetic oligonucleotide"
guuuaagagcuaugcuggaaacagcauagcaaguuuaaauaaggcuaguccguuaucaacuugaaaaaguggcaccgagucggugcuuuu

SEQ ID NO: 3156 - RNA, 67 nt, Artificial Sequence
  source: /note="Description of Artificial Sequence: Synthetic oligonucleotide"
agcauagcaaguuaaaauaaggcuaguccguuaucaacuugaaaaaguggcaccgagucggugcuuu

SEQ ID NO: 3157 - RNA, 85 nt, Artificial Sequence
  source: /note="Description of Artificial Sequence: Synthetic oligonucleotide"
guuggaaccauucaaaacagcauagcaaguuaaaauaaggcuaguccguuaucaacuugaaaaaguggcaccgagucggugcuuu

SEQ ID NO: 3158 - protein, 7 aa, Tobacco etch virus
ENLYFQG

SEQ ID NO: 3159 - RNA, 80 nt, Artificial Sequence
  source: /note="Description of Artificial Sequence: Synthetic oligonucleotide"
guuuuagagcuagaaauagcaaguuaaaauaaggcuaguccguuaucaacuugaaaaaguggcaccgagucggugcuuuu

SEQ ID NO: 3160 - RNA, 67 nt, Artificial Sequence
  source: /note="Description of Artificial Sequence: Synthetic oligonucleotide"
aacagcauagcaaguuaaaauaaggcuaguccguuaucaacuugaaaaaguggcaccgagucggugc

SEQ ID NO: 3161 - protein, 1393 aa, Artificial Sequence
  source: /note="Description of Artificial Sequence: Synthetic polypeptide"
MAPKKKRKVDKKYSIGLDIGTNSVGWAVITDEYKVPSKKFKVLGNTDRHSIKKNLIGALLFDSGETAEATRLKRTARRRYTRRKNRICYLQEIFSNEMAKVDDSFFHRLEESFLVEEDKKHERHPIFGNIVDEVAYHEKYPTIYHLRKKLVDSTDKADLRLIYLALAHMIKFRGHFLIEGDLNPDNSDVDKLFIQLVQTYNQLFEENPINASGVDAKAILSARLSKSRRLENLIAQLPGEKKNGLFGNLIALSLGLTPNFKSNFDLAEDAKLQLSKDTYDDDLDNLLAQIGDQYADLFLAAKNLSDAILLSDILRVNTEITKAPLSASMIKRYDEHHQDLTLLKALVRQQLPEKYKEIFFDQSKNGYAGYIDGGASQEEFYKFIKPILEKMDGTEELLVKLNREDLLRKQRTFDNGSIPHQIHLGELHAILRRQEDFYPFLKDNREKIEKILTFRIPYYVGPLARGNSRFAWMTRKSEETITPWNFEEVVDKGASAQSFIERMTNFDKNLPNEKVLPKHSLLYEYFTVYNELTKVKYVTEGMRKPAFLSGEQKKAIVDLLFKTNRKVTVKQLKEDYFKKIECFDSVEISGVEDRFNASLGTYHDLLKIIKDKDFLDNEENEDILEDIVLTLTLFEDREMIEERLKTYAHLFDDKVMKQLKRRRYTGWGRLSRKLINGIRDKQSGKTILDFLKSDGFANRNFMQLIHDDSLTFKEDIQKAQVSGQGDSLHEHIANLAGSPAIKKGILQTVKVVDELVKVMGRHKPENIVIEMARENQTTQKGQKNSRERMKRIEEGIKELGSQILKEHPVENTQLQNEKLYLYYLQNGRDMYVDQELDINRLSDYDVDHIVPQSFLKDDSIDNKVLTRSDKNRGKSDNVPSEEVVKKMKNYWRQLLNAKLITQRKFDNLTKAERGGLSELDKAGFIKRQLVETRQITKHVAQILDSRMNTKYDENDKLIREVKVITLKSKLVSDFRKDFQFYKVREINNYHHAHDAYLNAVVGTALIKKYPKLESEFVYGDYKVYDVRKMIAKSEQEIGKATAKYFFYSNIMNFFKTEITLANGEIRKRPLIETNGETGEIVWDKGRDFATVRKVLSMPQVNIVKKTEVQTGGFSKESILPKRNSDKLIARKKDWDPKKYGGFDSPTVAYSVLVVAKVEKGKSKKLKSVKELLGITIMERSSFEKNPIDFLEAKGYKEVKKDLIIKLPKYSLFELENGRKRMLASAGELQKGNELALPSKYVNFLYLASHYEKLKGSPEDNEQKQLFVEQHKHYLDEIIEQISEFSKRVILADANLDKVLSAYNKHRDKPIREQAENIIHLFTLTNLGAPAAFKYFDTTIDRKRYTSTKEVLDATLIHQSITGLYETRIDLSQLGGDSRADPKKKRKVHHHHHH

SEQ ID NO: 3162 - protein, 1393 aa, Artificial Sequence
  source: /note="Description of Artificial Sequence: Synthetic polypeptide"
MAPKKKRKVDKKYSIGLDIGTNSVGWAVITDEYKVPSKKFKVLGNTDRHSIKKNLIGALLFDSGETAEATRLKRTARRRYTRRKNRILYLQEIFSNEMAKVDDSFFHRLEESFLVEEDKKHERHPIFGNIVDEVAYHEKYPTIYHLRKKLVDSTDKADLRLIYLALAHMIKFRGHFLIEGDLNPDNSDVDKLFIQLVQTYNQLFEENPINASGVDAKAILSARLSKSRRLENLIAQLPGEKKNGLFGNLIALSLGLTPNFKSNFDLAEDAKLQLSKDTYDDDLDNLLAQIGDQYADLFLAAKNLSDAILLSDILRVNTEITKAPLSASMIKRYDEHHQDLTLLKALVRQQLPEKYKEIFFDQSKNGYAGYIDGGASQEEFYKFIKPILEKMDGTEELLVKLNREDLLRKQRTFDNGSIPHQIHLGELHAILRRQEDFYPFLKDNREKIEKILTFRIPYYVGPLARGNSRFAWMTRKSEETITPWNFEEVVDKGASAQSFIERMTNFDKNLPNEKVLPKHSLLYEYFTVYNELTKVKYVTEGMRKPAFLSGEQKKAIVDLLFKTNRKVTVKQLKEDYFKKIEEFDSVEISGVEDRFNASLGTYHDLLKIIKDKDFLDNEENEDILEDIVLTLTLFEDREMIEERLKTYAHLFDDKVMKQLKRRRYTGWGRLSRKLINGIRDKQSGKTILDFLKSDGFANRNFMQLIHDDSLTFKEDIQKAQVSGQGDSLHEHIANLAGSPAIKKGILQTVKVVDELVKVMGRHKPENIVIEMARENQTTQKGQKNSRERMKRIEEGIKELGSQILKEHPVENTQLQNEKLYLYYLQNGRDMYVDQELDINRLSDYDVDHIVPQSFLKDDSIDNKVLTRSDKNRGKSDNVPSEEVVKKMKNYWRQLLNAKLITQRKFDNLTKAERGGLSELDKAGFIKRQLVETRQITKHVAQILDSRMNTKYDENDKLIREVKVITLKSKLVSDFRKDFQFYKVREINNYHHAHDAYLNAVVGTALIKKYPKLESEFVYGDYKVYDVRKMIAKSEQEIGKATAKYFFYSNIMNFFKTEITLANGEIRKRPLIETNGETGEIVWDKGRDFATVRKVLSMPQVNIVKKTEVQTGGFSKESILPKRNSDKLIARKKDWDPKKYGGFDSPTVAYSVLVVAKVEKGKSKKLKSVKELLGITIMERSSFEKNPIDFLEAKGYKEVKKDLIIKLPKYSLFELENGRKRMLASAGELQKGNELALPSKYVNFLYLASHYEKLKGSPEDNEQKQLFVEQHKHYLDEIIEQISEFSKRVILADANLDKVLSAYNKHRDKPIREQAENIIHLFTLTNLGAPAAFKYFDTTIDRKRYTSTKEVLDATLIHQSITGLYETRIDLSQLGGDSRADPKKKRKVHHHHHH

SEQ ID NO: 3163 - protein, 1399 aa, Artificial Sequence
  source: /note="Description of Artificial Sequence: Synthetic polypeptide"
MGSSHHHHHHHHENLYFQGSMDKKYSIGLDIGTNSVGWAVITDEYKVPSKKFKVLGNTDRHSIKKNLIGALLFDSGETAEATRLKRTARRRYTRRKNRICYLQEIFSNEMAKVDDSFFHRLEESFLVEEDKKHERHPIFGNIVDEVAYHEKYPTIYHLRKKLVDSTDKADLRLIYLALAHMIKFRGHFLIEGDLNPDNSDVDKLFIQLVQTYNQLFEENPINASGVDAKAILSARLSKSRRLENLIAQLPGEKKNGLFGNLIALSLGLTPNFKSNFDLAEDAKLQLSKDTYDDDLDNLLAQIGDQYADLFLAAKNLSDAILLSDILRVNTEITKAPLSASMIKRYDEHHQDLTLLKALVRQQLPEKYKEIFFDQSKNGYAGYIDGGASQEEFYKFIKPILEKMDGTEELLVKLNREDLLRKQRTFDNGSIPHQIHLGELHAILRRQEDFYPFLKDNREKIEKILTFRIPYYVGPLARGNSRFAWMTRKSEETITPWNFEEVVDKGASAQSFIERMTNFDKNLPNEKVLPKHSLLYEYFTVYNELTKVKYVTEGMRKPAFLSGEQKKAIVDLLFKTNRKVTVKQLKEDYFKKIECFDSVEISGVEDRFNASLGTYHDLLKIIKDKDFLDNEENEDILEDIVLTLTLFEDREMIEERLKTYAHLFDDKVMKQLKRRRYTGWGRLSRKLINGIRDKQSGKTILDFLKSDGFANRNFMQLIHDDSLTFKEDIQKAQVSGQGDSLHEHIANLAGSPAIKKGILQTVKVVDELVKVMGRHKPENIVIEMARENQTTQKGQKNSRERMKRIEEGIKELGSQILKEHPVENTQLQNEKLYLYYLQNGRDMYVDQELDINRLSDYDVDHIVPQSFLKDDSIDNKVLTRSDKNRGKSDNVPSEEVVKKMKNYWRQLLNAKLITQRKFDNLTKAERGGLSELDKAGFIKRQLVETRQITKHVAQILDSRMNTKYDENDKLIREVKVITLKSKLVSDFRKDFQFYKVREINNYHHAHDAYLNAVVGTALIKKYPKLESEFVYGDYKVYDVRKMIAKSEQEIGKATAKYFFYSNIMNFFKTEITLANGEIRKRPLIETNGETGEIVWDKGRDFATVRKVLSMPQVNIVKKTEVQTGGFSKESILPKRNSDKLIARKKDWDPKKYGGFDSPTVAYSVLVVAKVEKGKSKKLKSVKELLGITIMERSSFEKNPIDFLEAKGYKEVKKDLIIKLPKYSLFELENGRKRMLASAGELQKGNELALPSKYVNFLYLASHYEKLKGSPEDNEQKQLFVEQHKHYLDEIIEQISEFSKRVILADANLDKVLSAYNKHRDKPIREQAENIIHLFTLTNLGAPAAFKYFDTTIDRKRYTSTKEVLDATLIHQSITGLYETRIDLSQLGGDGGGSPKKKRKV

SEQ ID NO: 3164 - protein, 1396 aa, Artificial Sequence
  source: /note="Description of Artificial Sequence: Synthetic polypeptide"
MAHHHHHHGGSPKKKRKVDKKYSIGLDIGTNSVGWAVITDEYKVPSKKFKVLGNTDRHSIKKNLIGALLFDSGETAEATRLKRTARRRYTRRKNRICYLQEIFSNEMAKVDDSFFHRLEESFLVEEDKKHERHPIFGNIVDEVAYHEKYPTIYHLRKKLVDSTDKADLRLIYLALAHMIKFRGHFLIEGDLNPDNSDVDKLFIQLVQTYNQLFEENPINASGVDAKAILSARLSKSRRLENLIAQLPGEKKNGLFGNLIALSLGLTPNFKSNFDLAEDAKLQLSKDTYDDDLDNLLAQIGDQYADLFLAAKNLSDAILLSDILRVNTEITKAPLSASMIKRYDEHHQDLTLLKALVRQQLPEKYKEIFFDQSKNGYAGYIDGGASQEEFYKFIKPILEKMDGTEELLVKLNREDLLRKQRTFDNGSIPHQIHLGELHAILRRQEDFYPFLKDNREKIEKILTFRIPYYVGPLARGNSRFAWMTRKSEETITPWNFEEVVDKGASAQSFIERMTNFDKNLPNEKVLPKHSLLYEYFTVYNELTKVKYVTEGMRKPAFLSGEQKKAIVDLLFKTNRKVTVKQLKEDYFKKIECFDSVEISGVEDRFNASLGTYHDLLKIIKDKDFLDNEENEDILEDIVLTLTLFEDREMIEERLKTYAHLFDDKVMKQLKRRRYTGWGRLSRKLINGIRDKQSGKTILDFLKSDGFANRNFMQLIHDDSLTFKEDIQKAQVSGQGDSLHEHIANLAGSPAIKKGILQTVKVVDELVKVMGRHKPENIVIEMARENQTTQKGQKNSRERMKRIEEGIKELGSQILKEHPVENTQLQNEKLYLYYLQNGRDMYVDQELDINRLSDYDVDHIVPQSFLKDDSIDNKVLTRSDKNRGKSDNVPSEEVVKKMKNYWRQLLNAKLITQRKFDNLTKAERGGLSELDKAGFIKRQLVETRQITKHVAQILDSRMNTKYDENDKLIREVKVITLKSKLVSDFRKDFQFYKVREINNYHHAHDAYLNAVVGTALIKKYPKLESEFVYGDYKVYDVRKMIAKSEQEIGKATAKYFFYSNIMNFFKTEITLANGEIRKRPLIETNGETGEIVWDKGRDFATVRKVLSMPQVNIVKKTEVQTGGFSKESILPKRNSDKLIARKKDWDPKKYGGFDSPTVAYSVLVVAKVEKGKSKKLKSVKELLGITIMERSSFEKNPIDFLEAKGYKEVKKDLIIKLPKYSLFELENGRKRMLASAGELQKGNELALPSKYVNFLYLASHYEKLKGSPEDNEQKQLFVEQHKHYLDEIIEQISEFSKRVILADANLDKVLSAYNKHRDKPIREQAENIIHLFTLTNLGAPAAFKYFDTTIDRKRYTSTKEVLDATLIHQSITGLYETRIDLSQLGGDSRADPKKKRKV

SEQ ID NO: 3165 - protein, 1386 aa, Artificial Sequence
  source: /note="Description of Artificial Sequence: Synthetic polypeptide"
MAPKKKRKVDKKYSIGLDIGTNSVGWAVITDEYKVPSKKFKVLGNTDRHSIKKNLIGALLFDSGETAEATRLKRTARRRYTRRKNRICYLQEIFSNEMAKVDDSFFHRLEESFLVEEDKKHERHPIFGNIVDEVAYHEKYPTIYHLRKKLVDSTDKADLRLIYLALAHMIKFRGHFLIEGDLNPDNSDVDKLFIQLVQTYNQLFEENPINASGVDAKAILSARLSKSRRLENLIAQLPGEKKNGLFGNLIALSLGLTPNFKSNFDLAEDAKLQLSKDTYDDDLDNLLAQIGDQYADLFLAAKNLSDAILLSDILRVNTEITKAPLSASMIKRYDEHHQDLTLLKALVRQQLPEKYKEIFFDQSKNGYAGYIDGGASQEEFYKFIKPILEKMDGTEELLVKLNREDLLRKQRTFDNGSIPHQIHLGELHAILRRQEDFYPFLKDNREKIEKILTFRIPYYVGPLARGNSRFAWMTRKSEETITPWNFEEVVDKGASAQSFIERMTNFDKNLPNEKVLPKHSLLYEYFTVYNELTKVKYVTEGMRKPAFLSGEQKKAIVDLLFKTNRKVTVKQLKEDYFKKIECFDSVEISGVEDRFNASLGTYHDLLKIIKDKDFLDNEENEDILEDIVLTLTLFEDREMIEERLKTYAHLFDDKVMKQLKRRRYTGWGRLSRKLINGIRDKQSGKTILDFLKSDGFANRNFMQLIHDDSLTFKEDIQKAQVSGQGDSLHEHIANLAGSPAIKKGILQTVKVVDELVKVMGRHKPENIVIEMARENQTTQKGQKNSRERMKRIEEGIKELGSQILKEHPVENTQLQNEKLYLYYLQNGRDMYVDQELDINRLSDYDVDHIVPQSFLKDDSIDNKVLTRSDKNRGKSDNVPSEEVVKKMKNYWRQLLNAKLITQRKFDNLTKAERGGLSELDKAGFIKRQLVETRQITKHVAQILDSRMNTKYDENDKLIREVKVITLKSKLVSDFRKDFQFYKVREINNYHHAHDAYLNAVVGTALIKKYPKLESEFVYGDYKVYDVRKMIAKSEQEIGKATAKYFFYSNIMNFFKTEITLANGEIRKRPLIETNGETGEIVWDKGRDFATVRKVLSMPQVNIVKKTEVQTGGFSKESILPKRNSDKLIARKKDWDPKKYGGFDSPTVAYSVLVVAKVEKGKSKKLKSVKELLGITIMERSSFEKNPIDFLEAKGYKEVKKDLIIKLPKYSLFELENGRKRMLASAGELQKGNELALPSKYVNFLYLASHYEKLKGSPEDNEQKQLFVEQHKHYLDEIIEQISEFSKRVILADANLDKVLSAYNKHRDKPIREQAENIIHLFTLTNLGAPAAFKYFDTTIDRKRYTSTKEVLDATLIHQSITGLYETRIDLSQLGGDSRADHHHHHH

SEQ ID NO: 3166 - protein, 1389 aa, Artificial Sequence
  source: /note="Description of Artificial Sequence: Synthetic polypeptide"
MAHHHHHHGGSDKKYSIGLDIGTNSVGWAVITDEYKVPSKKFKVLGNTDRHSIKKNLIGALLFDSGETAEATRLKRTARRRYTRRKNRICYLQEIFSNEMAKVDDSFFHRLEESFLVEEDKKHERHPIFGNIVDEVAYHEKYPTIYHLRKKLVDSTDKADLRLIYLALAHMIKFRGHFLIEGDLNPDNSDVDKLFIQLVQTYNQLFEENPINASGVDAKAILSARLSKSRRLENLIAQLPGEKKNGLFGNLIALSLGLTPNFKSNFDLAEDAKLQLSKDTYDDDLDNLLAQIGDQYADLFLAAKNLSDAILLSDILRVNTEITKAPLSASMIKRYDEHHQDLTLLKALVRQQLPEKYKEIFFDQSKNGYAGYIDGGASQEEFYKFIKPILEKMDGTEELLVKLNREDLLRKQRTFDNGSIPHQIHLGELHAILRRQEDFYPFLKDNREKIEKILTFRIPYYVGPLARGNSRFAWMTRKSEETITPWNFEEVVDKGASAQSFIERMTNFDKNLPNEKVLPKHSLLYEYFTVYNELTKVKYVTEGMRKPAFLSGEQKKAIVDLLFKTNRKVTVKQLKEDYFKKIECFDSVEISGVEDRFNASLGTYHDLLKIIKDKDFLDNEENEDILEDIVLTLTLFEDREMIEERLKTYAHLFDDKVMKQLKRRRYTGWGRLSRKLINGIRDKQSGKTILDFLKSDGFANRNFMQLIHDDSLTFKEDIQKAQVSGQGDSLHEHIANLAGSPAIKKGILQTVKVVDELVKVMGRHKPENIVIEMARENQTTQKGQKNSRERMKRIEEGIKELGSQILKEHPVENTQLQNEKLYLYYLQNGRDMYVDQELDINRLSDYDVDHIVPQSFLKDDSIDNKVLTRSDKNRGKSDNVPSEEVVKKMKNYWRQLLNAKLITQRKFDNLTKAERGGLSELDKAGFIKRQLVETRQITKHVAQILDSRMNTKYDENDKLIREVKVITLKSKLVSDFRKDFQFYKVREINNYHHAHDAYLNAVVGTALIKKYPKLESEFVYGDYKVYDVRKMIAKSEQEIGKATAKYFFYSNIMNFFKTEITLANGEIRKRPLIETNGETGEIVWDKGRDFATVRKVLSMPQVNIVKKTEVQTGGFSKESILPKRNSDKLIARKKDWDPKKYGGFDSPTVAYSVLVVAKVEKGKSKKLKSVKELLGITIMERSSFEKNPIDFLEAKGYKEVKKDLIIKLPKYSLFELENGRKRMLASAGELQKGNELALPSKYVNFLYLASHYEKLKGSPEDNEQKQLFVEQHKHYLDEIIEQISEFSKRVILADANLDKVLSAYNKHRDKPIREQAENIIHLFTLTNLGAPAAFKYFDTTIDRKRYTSTKEVLDATLIHQSITGLYETRIDLSQLGGDSRADPKKKRKV

SEQ ID NO: 3167 - protein, 1399 aa, Artificial Sequence; identical to SEQ ID NO: 3163
  source: /note="Description of Artificial Sequence: Synthetic polypeptide"

SEQ ID NO: 3168 - protein, 1393 aa, Artificial Sequence
  source: /note="Description of Artificial Sequence: Synthetic polypeptide"
MAPKKKRKVDKKYSIGLDIGTNSVGWAVITDEYKVPSKKFKVLGNTDRHSIKKNLIGALLFDSGETAEATRLKRTARRRYTRRKNRICYLQEIFSNEMAKVDDSFFHRLEESFLVEEDKKHERHPIFGNIVDEVAYHEKYPTIYHLRKKLVDSTDKADLRLIYLALAHMIKFRGHFLIEGDLNPDNSDVDKLFIQLVQTYNQLFEENPINASGVDAKAILSARLSKSRRLENLIAQLPGEKKNGLFGNLIALSLGLTPNFKSNFDLAEDAKLQLSKDTYDDDLDNLLAQIGDQYADLFLAAKNLSDAILLSDILRVNTEITKAPLSASMIKRYDEHHQDLTLLKALVRQQLPEKYKEIFFDQSKNGYAGYIDGGASQEEFYKFIKPILEKMDGTEELLVKLNREDLLRKQRTFDNGSIPHQIHLGELHAILRRQEDFYPFLKDNREKIEKILTFRIPYYVGPLARGNSRFAWMTRKSEETITPWNFEEVVDKGASAQSFIERMTNFDKNLPNEKVLPKHSLLYEYFTVYNELTKVKYVTEGMRKPAFLSGEQKKAIVDLLFKTNRKVTVKQLKEDYFKKIECFDSVEISGVEDRFNASLGTYHDLLKIIKDKDFLDNEENEDILEDIVLTLTLFEDREMIEERLKTYAHLFDDKVMKQLKRRRYTGWGRLSRKLINGIRDKQSGKTILDFLKSDGFANRNFMQLIHDDSLTFKEDIQKAQVSGQGDSLHEHIANLAGSPAIKKGILQTVKVVDELVKVMGRHKPENIVIEMARENQTTQKGQKNSRERMKRIEEGIKELGSQILKEHPVENTQLQNEKLYLYYLQNGRDMYVDQELDINRLSDYDVDHIVPQSFLKDDSIDNAVLTRSDKNRGKSDNVPSEEVVKKMKNYWRQLLNAKLITQRKFDNLTKAERGGLSELDKAGFIKRQLVETRQITKHVAQILDSRMNTKYDENDKLIREVKVITLKSKLVSDFRKDFQFYKVREINNYHHAHDAYLNAVVGTALIKKYPKLESEFVYGDYKVYDVRKMIAKSEQEIGKATAKYFFYSNIMNFFKTEITLANGEIRKRPLIETNGETGEIVWDKGRDFATVRKVLSMPQVNIVKKTEVQTGGFSKESILPKRNSDKLIARKKDWDPKKYGGFDSPTVAYSVLVVAKVEKGKSKKLKSVKELLGITIMERSSFEKNPIDFLEAKGYKEVKKDLIIKLPKYSLFELENGRKRMLASAGELQKGNELALPSKYVNFLYLASHYEKLKGSPEDNEQKQLFVEQHKHYLDEIIEQISEFSKRVILADANLDKVLSAYNKHRDKPIREQAENIIHLFTLTNLGAPAAFKYFDTTIDRKRYTSTKEVLDATLIHQSITGLYETRIDLSQLGGDSRADPKKKRKVHHHHHH

SEQ ID NO: 3169 - protein, 1393 aa, Artificial Sequence
  source: /note="Description of Artificial Sequence: Synthetic polypeptide"
MAPKKKRKVDKKYSIGLDIGTNSVGWAVITDEYKVPSKKFKVLGNTDRHSIKKNLIGALLFDSGETAEATRLKRTARRRYTRRKNRICYLQEIFSNEMAKVDDSFFHRLEESFLVEEDKKHERHPIFGNIVDEVAYHEKYPTIYHLRKKLVDSTDKADLRLIYLALAHMIKFRGHFLIEGDLNPDNSDVDKLFIQLVQTYNQLFEENPINASGVDAKAILSARLSKSRRLENLIAQLPGEKKNGLFGNLIALSLGLTPNFKSNFDLAEDAKLQLSKDTYDDDLDNLLAQIGDQYADLFLAAKNLSDAILLSDILRVNTEITKAPLSASMIKRYDEHHQDLTLLKALVRQQLPEKYKEIFFDQSKNGYAGYIDGGASQEEFYKFIKPILEKMDGTEELLVKLNREDLLRKQRTFDNGSIPHQIHLGELHAILRRQEDFYPFLKDNREKIEKILTFRIPYYVGPLARGNSRFAWMTRKSEETITPWNFEEVVDKGASAQSFIERMTNFDKNLPNEKVLPKHSLLYEYFTVYNELTKVKYVTEGMRKPAFLSGEQKKAIVDLLFKTNRKVTVKQLKEDYFKKIECFDSVEISGVEDRFNASLGTYHDLLKIIKDKDFLDNEENEDILEDIVLTLTLFEDREMIEERLKTYAHLFDDKVMKQLKRRRYTGWGRLSRKLINGIRDKQSGKTILDFLKSDGFANRNFMQLIHDDSLTFKEDIQKAQVSGQGDSLHEHIANLAGSPAIKKGILQTVKVVDELVKVMGRHKPENIVIEMARENQTTQKGQKNSRERMKRIEEGIKELGSQILKEHPVENTQLQNEALYLYYLQNGRDMYVDQELDINRLSDYDVDHIVPQSFLKDDSIDNKVLTRSDKNRGKSDNVPSEEVVKKMKNYWRQLLNAKLITQRKFDNLTKAERGGLSELDKAGFIKRQLVETRQITKHVAQILDSRMNTKYDENDKLIREVKVITLKSKLVSDFRKDFQFYKVREINNYHHAHDAYLNAVVGTALIKKYPALESEFVYGDYKVYDVRKMIAKSEQEIGKATAKYFFYSNIMNFFKTEITLANGEIRKAPLIETNGETGEIVWDKGRDFATVRKVLSMPQVNIVKKTEVQTGGFSKESILPKRNSDKLIARKKDWDPKKYGGFDSPTVAYSVLVVAKVEKGKSKKLKSVKELLGITIMERSSFEKNPIDFLEAKGYKEVKKDLIIKLPKYSLFELENGRKRMLASAGELQKGNELALPSKYVNFLYLASHYEKLKGSPEDNEQKQLFVEQHKHYLDEIIEQISEFSKRVILADANLDKVLSAYNKHRDKPIREQAENIIHLFTLTNLGAPAAFKYFDTTIDRKRYTSTKEVLDATLIHQSITGLYETRIDLSQLGGDSRADPKKKRKVHHHHHH

SEQ ID NO: 3170 - protein, 1393 aa, Artificial Sequence
  source: /note="Description of Artificial Sequence: Synthetic polypeptide"
MAPKKKRKVDKKYSIGLDIGTNSVGWAVITDEYKVPSKKFKVLGNTDRHSIKKNLIGALLFDSGETAEATRLKRTARRRYTRRKNRICYLQEIFSNEMAKVDDSFFHRLEESFLVEEDKKHERHPIFGNIVDEVAYHEKYPTIYHLRKKLVDSTDKADLRLIYLALAHMIKFRGHFLIEGDLNPDNSDVDKLFIQLVQTYNQLFEENPINASGVDAKAILSARLSKSRRLENLIAQLPGEKKNGLFGNLIALSLGLTPNFKSNFDLAEDAKLQLSKDTYDDDLDNLLAQIGDQYADLFLAAKNLSDAILLSDILRVNTEITKAPLSASMIKRYDEHHQDLTLLKALVRQQLPEKYKEIFFDQSKNGYAGYIDGGASQEEFYKFIKPILEKMDGTEELLVKLNREDLLRKQRTFDNGSIPHQIHLGELHAILRRQEDFYPFLKDNREKIEKILTFRIPYYVGPLARGNSRFAWMTRKSEETITPWNFEEVVDKGASAQSFIERMTNFDKNLPNEKVLPKHSLLYEYFTVYNELTKVKYVTEGMRKPAFLSGEQKKAIVDLLFKTNRKVTVKQLKEDYFKKIECFDSVEISGVEDRFNASLGTYHDLLKIIKDKDFLDNEENEDILEDIVLTLTLFEDREMIEERLKTYAHLFDDKVMKQLKRRRYTGWGRLSRKLINGIRDKQSGKTILDFLKSDGFANRNFMQLIHDDSLTFKEDIQKAQVSGQGDSLHEHIANLAGSPAIKKGILQTVKVVDELVKVMGRHKPENIVIEMARENQTTQKGQKNSRERMKRIEEGIKELGSQILKEHPVENTQLQNEKLYLYYLQNGRDMYVDQELDINRLSDYDVDHIVPQSFLADDSIDNKVLTRSDKNRGKSDNVPSEEVVKKMKNYWRQLLNAKLITQRKFDNLTKAERGGLSELDKAGFIKRQLVETRQITKHVAQILDSRMNTKYDENDKLIREVKVITLKSKLVSDFRKDFQFYKVREINNYHHAHDAYLNAVVGTALIKKYPALESEFVYGDYKVYDVRKMIAKSEQEIGKATAKYFFYSNIMNFFKTEITLANGEIRKAPLIETNGETGEIVWDKGRDFATVRKVLSMPQVNIVKKTEVQTGGFSKESILPKRNSDKLIARKKDWDPKKYGGFDSPTVAYSVLVVAKVEKGKSKKLKSVKELLGITIMERSSFEKNPIDFLEAKGYKEVKKDLIIKLPKYSLFELENGRKRMLASAGELQKGNELALPSKYVNFLYLASHYEKLKGSPEDNEQKQLFVEQHKHYLDEIIEQISEFSKRVILADANLDKVLSAYNKHRDKPIREQAENIIHLFTLTNLGAPAAFKYFDTTIDRKRYTSTKEVLDATLIHQSITGLYETRIDLSQLGGDSRADPKKKRKVHHHHHH

SEQ ID NO: 3171 - protein, 1393 aa, Artificial Sequence
  source: /note="Description of Artificial Sequence: Synthetic polypeptide"
MAPKKKRKVDKKYSIGLDIGTNSVGWAVITDEYKVPSKKFKVLGNTDRHSIKKNLIGALLFDSGETAEATRLKRTARRRYTRRKNRICYLQEIFSNEMAKVDDSFFHRLEESFLVEEDKKHERHPIFGNIVDEVAYHEKYPTIYHLRKKLVDSTDKADLRLIYLALAHMIKFRGHFLIEGDLNPDNSDVDKLFIQLVQTYNQLFEENPINASGVDAKAILSARLSKSRRLENLIAQLPGEKKNGLFGNLIALSLGLTPNFKSNFDLAEDAKLQLSKDTYDDDLDNLLAQIGDQYADLFLAAKNLSDAILLSDILRVNTEITKAPLSASMIKRYDEHHQDLTLLKALVRQQLPEKYKEIFFDQSKNGYAGYIDGGASQEEFYKFIKPILEKMDGTEELLVKLNREDLLRKQRTFDNGSIPHQIHLGELHAILRRQEDFYPFLKDNREKIEKILTFRIPYYVGPLARGNSRFAWMTRKSEETITPWNFEEVVDKGASAQSFIERMTAFDKNLPNEKVLPKHSLLYEYFTVYNELTKVKYVTEGMRKPAFLSGEQKKAIVDLLFKTNRKVTVKQLKEDYFKKIECFDSVEISGVEDRFNASLGTYHDLLKIIKDKDFLDNEENEDILEDIVLTLTLFEDREMIEERLKTYAHLFDDKVMKQLKRRRYTGWGALSRKLINGIRDKQSGKTILDFLKSDGFANRNFMALIHDDSLTFKEDIQKAQVSGQGDSLHEHIANLAGSPAIKKGILQTVKVVDELVKVMGRHKPENIVIEMARENQTTQKGQKNSRERMKRIEEGIKELGSQILKEHPVENTQLQNEKLYLYYLQNGRDMYVDQELDINRLSDYDVDHIVPQSFLKDDSIDNKVLTRSDKNRGKSDNVPSEEVVKKMKNYWRQLLNAKLITQRKFDNLTKAERGGLSELDKAGFIKRQLVETRAITKHVAQILDSRMNTKYDENDKLIREVKVITLKSKLVSDFRKDFQFYKVREINNYHHAHDAYLNAVVGTALIKKYPKLESEFVYGDYKVYDVRKMIAKSEQEIGKATAKYFFYSNIMNFFKTEITLANGEIRKRPLIETNGETGEIVWDKGRDFATVRKVLSMPQVNIVKKTEVQTGGFSKESILPKRNSDKLIARKKDWDPKKYGGFDSPTVAYSVLVVAKVEKGKSKKLKSVKELLGITIMERSSFEKNPIDFLEAKGYKEVKKDLIIKLPKYSLFELENGRKRMLASAGELQKGNELALPSKYVNFLYLASHYEKLKGSPEDNEQKQLFVEQHKHYLDEIIEQISEFSKRVILADANLDKVLSAYNKHRDKPIREQAENIIHLFTLTNLGAPAAFKYFDTTIDRKRYTSTKEVLDATLIHQSITGLYETRIDLSQLGGDSRADPKKKRKVHHHHHH

SEQ ID NO: 3172 - protein, 1386 aa, Artificial Sequence
  source: /note="Description of Artificial Sequence: Synthetic polypeptide"
MAPKKKRKVDKKYSIGLDIGTNSVGWAVITDEYKVPSKKFKVLGNTDRHSIKKNLIGALLFDSGETAEATRLKRTARRRYTRRKNRILYLQEIFSNEMAKVDDSFFHRLEESFLVEEDKKHERHPIFGNIVDEVAYHEKYPTIYHLRKKLVDSTDKADLRLIYLALAHMIKFRGHFLIEGDLNPDNSDVDKLFIQLVQTYNQLFEENPINASGVDAKAILSARLSKSRRLENLIAQLPGEKKNGLFGNLIALSLGLTPNFKSNFDLAEDAKLQLSKDTYDDDLDNLLAQIGDQYADLFLAAKNLSDAILLSDILRVNTEITKAPLSASMIKRYDEHHQDLTLLKALVRQQLPEKYKEIFFDQSKNGYAGYIDGGASQEEFYKFIKPILEKMDGTEELLVKLNREDLLRKQRTFDNGSIPHQIHLGELHAILRRQEDFYPFLKDNREKIEKILTFRIPYYVGPLARGNSRFAWMTRKSEETITPWNFEEVVDKGASAQSFIERMTNFDKNLPNEKVLPKHSLLYEYFTVYNELTKVKYVTEGMRKPAFLSGEQKKAIVDLLFKTNRKVTVKQLKEDYFKKIEEFDSVEISGVEDRFNASLGTYHDLLKIIKDKDFLDNEENEDILEDIVLTLTLFEDREMIEERLKTYAHLFDDKVMKQLKRRRYTGWGRLSRKLINGIRDKQSGKTILDFLKSDGFANRNFMQLIHDDSLTFKEDIQKAQVSGQGDSLHEHIANLAGSPAIKKGILQTVKVVDELVKVMGRHKPENIVIEMARENQTTQKGQKNSRERMKRIEEGIKELGSQILKEHPVENTQLQNEKLYLYYLQNGRDMYVDQELDINRLSDYDVDHIVPQSFLKDDSIDNKVLTRSDKNRGKSDNVPSEEVVKKMKNYWRQLLNAKLITQRKFDNLTKAERGGLSELDKAGFIKRQLVETRQITKHVAQILDSRMNTKYDENDKLIREVKVITLKSKLVSDFRKDFQFYKVREINNYHHAHDAYLNAVVGTALIKKYPKLESEFVYGDYKVYDVRKMIAKSEQEIGKATAKYFFYSNIMNFFKTEITLANGEIRKRPLIETNGETGEIVWDKGRDFATVRKVLSMPQVNIVKKTEVQTGGFSKESILPKRNSDKLIARKKDWDPKKYGGFDSPTVAYSVLVVAKVEKGKSKKLKSVKELLGITIMERSSFEKNPIDFLEAKGYKEVKKDLIIKLPKYSLFELENGRKRMLASAGELQKGNELALPSKYVNFLYLASHYEKLKGSPEDNEQKQLFVEQHKHYLDEIIEQISEFSKRVILADANLDKVLSAYNKHRDKPIREQAENIIHLFTLTNLGAPAAFKYFDTTIDRKRYTSTKEVLDATLIHQSITGLYETRIDLSQLGGDSRADHHHHHH

SEQ ID NO: 3173 - protein, 1651 aa, Homo sapiens
MEGSLAGSLAAPDRPQGPERLPGPAPRENIEGGAEAAEGEGGIFRSTRYLPVTKEGPRDILDGRGGISGTPDGRGPWEHPLVQEAGEGILSERRFEDSVIVRTMKPHAELEGSRRFLHHRGEPRLLEKHAQGRPRFDWLQDEDEQGSPQDAGLHLDLPAQPPPLAPFRRVFVPVEDTPKTLDMAVVGGREDLEDLEGLAQPSEWGLPTSASEVATQTWTVNSEASVERLQPLLPPIRTGPYLCELLEEVAEGVASPDEDEDEEPAVFPCIECSIYFKQKEHLLEHMSQHRRAPGQEPPADLAPLACGECGWAFADPTALEQHRQLHQASREKIIEEIQKLKQVPGDEGREARLQCPKCVFGTNSSRAYVQHAKLHMREPPGQTTKEPFGGSSGAGSPSPEASALLYQPYGAAVGLSACVFCGFPAPSESLLREHVRLVHAHPHWEEDGEAYEEDPASQPGTSQDAHACFPDTAVDYFGKAEPSLAPMWRENPAGYDPSLAFGPGCQQLSIRDFPLSKPLLHGTGQRPLGRLAFPSTLASTPYSLQLGRNKSTVHPQGLGERRRPWSEEEEEEEEEEDVVLTSEMDFSPENGVFSPLATPSLIPQAALELKQAFREALQAVEATQGQQQQLRGMVPIVLVAKLGPQVMAAARVPPRLQPEELGLAGAHPLDFLLLDAPLGGPLGLDTLLDGDPAMALKHEERKCPYCPDRFHNGIGLANHVRGHLNRVGVSYNVRHFISAEEVKAIERRFSFQKKKKKVANFDPGTFSLMRCDFCGAGFDTRAGLSSHARAHLRDFGITNWELTVSPINILQELLATSAAEQPPSPLGREPGGPPGSFLTSRRPRLPLTVPFPPTWAEDPGPAYGDAQSLTTCEVCGACFETRKGLSSHARSHLRQLGVAESESSGAPIDLLYELVKQKGLPDAHLGLPPGLAKKSSSLKEVVAGAPRPGLLSLAKPLDAPAVNKAIKSPPGFSAKGLGHPPSSPLLKKTPLALAGSPTPKNPEDKSPQLSLSPRPASPKAQWPQSEDEGPLNLTSGPEPARDIRCEFCGEFFENRKGLSSHARSHLRQMGVTEWYVNGSPIDTLREILKRRTQSRPGGPPNPPGPSPKALAKMMGGAGPGSSLEARSPSDLHISPLAKKLPPPPGSPLGHSPTASPPPTARKMFPGLAAPSLPKKLKPEQIRVEIKREMLPGALHGELHPSEGPWGAPREDMTPLNLSSRAEPVRDIRCEFCGEFFENRKGLSSHARSHLRQMGVTEWSVNGSPIDTLREILKKKSKPCLIKKEPPAGDLAPALAEDGPPTVAPGPVQSPLPLSPLAGRPGKPGAGPAQVPRELSLTPITGAKPSATGYLGSVAAKRPLQEDRLLPAEVKAKTYIQTELPFKAKTLHEKTSHSSTEACCELCGLYFENRKALASHARAHLRQFGVTEWCVNGSPIETLSEWIKHRPQKVGAYRSYIQGGRPFTKKFRSAGHGRDSDKRPSLGLAPGGLAVVGRSAGGEPGPEAGRAADGGERPLAASPPGTVKAEEHQRQNINKFERRQARPPDASAARGGEDTNDLQQKLEEVRQPPPRVRPVPSLVPRPPQTSLVKFVGNIYTLKCRFCEVEFQGPLSIQEEWVRHLQRHILEMNFSKADPPPEESQAPQAQTAAAEAP

SEQ ID NO: 3174 - RNA, 74 nt, Artificial Sequence; identical to SEQ ID NO: 3109
  source: /note="Description of Artificial Sequence: Synthetic oligonucleotide"

SEQ ID NO: 3175 - protein, 6 aa, Artificial Sequence
  source: /note="Description of Artificial Sequence: Synthetic 6xHis tag"
HHHHHH

SEQ ID NO: 3176 - protein, 8 aa, Artificial Sequence
  source: /note="Description of Artificial Sequence: Synthetic 8xHis tag"
HHHHHHHH

SEQ ID NO: 3177 - RNA, 10 nt, Artificial Sequence
  source: /note="Description of Artificial Sequence: Synthetic oligonucleotide"
  misc_feature (1)..(10): /note="This sequence may encompass 1-10 nucleotides"
uuuuuuuuuu

SEQ ID NO: 3178 - RNA, 10 nt, Artificial Sequence
  source: /note="Description of Artificial Sequence: Synthetic oligonucleotide"
  misc_feature (1)..(10): /note="This sequence may encompass 1-10 nucleotides"
aaaaaaaaaa

SEQ ID NO: 3179 - RNA, 36 nt, Artificial Sequence
  source: /note="Description of Artificial Sequence: Synthetic oligonucleotide"
  modified_base (1)..(20): a, c, u, g, unknown or other
nnnnnnnnnnnnnnnnnnnnguuuuagagcuaugcu

SEQ ID NO: 3180 - RNA, 42 nt, Artificial Sequence
  source: /note="Description of Artificial Sequence: Synthetic oligonucleotide"
  modified_base (1)..(20): a, c, u, g, unknown or other
nnnnnnnnnnnnnnnnnnnnguuuuagagcuaugcuguuuug

SEQ ID NO: 3181 - RNA, 42 nt, Artificial Sequence; identical to SEQ ID NO: 3180
  source: /note="Description of Artificial Sequence: Synthetic oligonucleotide"
  modified_base (1)..(20): a, c, u, g, unknown or other

SEQ ID NO: 3182 - RNA, 100 nt, Artificial Sequence
  source: /note="Description of Artificial Sequence: Synthetic polynucleotide"
  modified_base (1)..(20): a, c, u, g, unknown or other
nnnnnnnnnnnnnnnnnnnnguuuuagagcuagaaauagcaaguuaaaauaaggcuaguccguuaucaacuugaaaaaguggcaccgagucggugcuuuu

SEQ ID NO: 3183 - RNA, 100 nt, Artificial Sequence; identical to SEQ ID NO: 3182
  source: /note="Description of Artificial Sequence: Synthetic polynucleotide"
  modified_base (1)..(20): a, c, u, g, unknown or other

SEQ ID NO: 3184 - RNA, 100 nt, Artificial Sequence; identical to SEQ ID NO: 3182
  source: /note="Description of Artificial Sequence: Synthetic polynucleotide"
  modified_base (1)..(20): a, c, u, g, unknown or other

SEQ ID NO: 3185 - DNA, 5702 bp, Homo sapiens
gatttaaagggacaatgtcccccgagcggtggaggcggcggcggctgcggaggccgcggcaccggcaccgggagcggcagcggcggtagcggcagcgacggccgcaccaaggaggggagctccgagccccggcacctggccggcggcgccgcctccccggcccacaatgccccgctgagccggtgcagcagctgagtggatccaagcagagaaaatccgatggaggggtctctggcaggcagcctggctgcaccagatcgtccccaaggcccagagagactgcctggcccggcgccaagggagaacatcgagggtggggccgaagctgctgagggggaaggtggcatcttccggtccacccgttacctgcctgtcaccaaggagggcccccgagacattctggatggcagaggtggcatctctgtggccaactttgacccaggcaccttcagcctgatgcgctgtgacttctgcggggctggcttcgacacacgggccggcctctccagccacgcccgggcccacctacgtgacttcggtatcaccaactgggagctcactgtctcacccatcaacatcctgcaggagctgctggccacctctgctgctgagcagccccccagccccctgggccgagagcctgggggtccgcctggcagcttcctgacctcccgtcggccccgcttacctctcacggtgccctttccacccacctgggctgaggaccctgggccagcctatggagatgcctcaggcccagagccagcacgagacatccgctgcgagttctgtggtgagttcttcgagaaccgcaagggcctctcgagccacgcgcgctcccatctgcggcaaatgggcgtgaccgagtggtacgtcaatggctcgcccatcgacacgctgcgggagatcctgaagagacggacccagtctcggcctggtggacctcccaacccaccagggccaagcccaaaagccctggccaagatgatgggcggcgcaggtcctggcagctcactggaagcccgcagcccctcggaccttcacatctcacccttggccaagaagttgccaccaccaccgggcagccccctgggccactcaccaactgcctctcctcctcctacggcccgaaagatgttcccaggcctggctgcaccctccttgcccaagaagctgaagcctgaacaaatacgggtggagatcaagcgggagatgctgccgggggcccttcatggggaactgcacccatctgagggtccctggggggcaccacgggaagacatgacacccctgaacctgtcgtcccgggcagagccggtgcgcgacatccgctgtgagttctgcggcgagttcttcgagaaccgcaagggcctgtcgagtcacgcgcgctcacacctgcggcagatgggtgtgaccgagtggtccgtcaatggttcgcccatcgacacactgcgagagatcctcaagaagaagtccaagccgtgcctcatcaagaaggagccaccggctggagacctggcccctgccctggctgaggacgggcctcccaccgtggcccctgggcccgtgcagtccccactgccgctgtcgcccctggctggccggccaggcaaaccaggtgcagggccggcccaggttcctcgtgagctcagcctgacgcccatcactggggccaagccctcagccactggctacctgggctcagtggcagccaagcggcccctgcaggaggaccgcctcctcccagcagaggtcaaggccaagacctacatccagactgaactgcccttcaaggcaaagacccttcatgagaagacctcccactcctccaccgaggcctgctgcgagctgtgtggcctttactttgaaaaccgcaaggccctggccagccacgcacgggcacacctgcggcagttcggcgtgaccgagtggtgcgtcaatggctcgcccatcgagacactgagcgagtggatcaaacaccggccccagaaggtgggcgcctaccgcagctacatccagggcggccgccccttcaccaagaagttccgcagtgccggccatggccgtgacagtgacaagcggccgtccctggggctggcacccgggggcctggccgtggtcggccgcagtgccggaggggagccagggcccgaggctggccgggcagccgacggtggtgagcggcctctggcagccagcccgccaggcaccgtgaaggctgaggagcaccagcggcagaacatcaacaaatttgaacgccgacaagcccgccctccagatgcctccgcagcccggggaggcgaggacaccaatgacctacagcagaagctggaggaggtgcggcaacccccaccccgagtccggccagtcccctccctggtgccccggcccccccagacatcacttgtcaagttcgtgggcaacatctacaccctcaaatgcaggttctgtgaggtggaattccagggccccctctccatccaggaagagtgggtgcggcacttacagcggcacatcctggagatgaacttctccaaagcggaccccccacctgaggagtcccaggccccgcaggcacagacagcggcggcagaggctccctaacacaaaagcattccagatcccctctcgtgccacctctgtctcctcttcttcctcctctgtgtccttgtccctcttcctctttctttccgtttccaaaggagcaagccaaaacctcaaaccggcgccccttgggggccgggcacactacagccagggcgccgggagccagctagctgcccttcccccagcccgaggactctggggccacagggtgtcttccttcagcccatgcccacctggtccagcaggggcagcagccaggtctctgatggcagccggtctggtcacaggggaggacagcactcccccgtctagcagccaggcagggcgatgtctgccatccgtggccatttgcaaagaccccaaagacccctgttctggttccctctctcccccatgaatatcctctcacacacatgtacatgcgaacacacacaacacgcacctcgtgagacccgggacctgccccggacccccagttcctgggttgaacgaccacatcatgccacggtgcttgctcaggggaagccacgctccctctgtggggcctgctggggcctgggagccccccactgagcccacaatgccacggaaatccttgttggctgcccccgagaggggccttcccagctgggaagagctcagagctgacagctgcctcctgccatgtcaaggccccccaaagagcctcaggggctctggggccctggagggtggggttggggggtgggactctcctcccccactcctgctccctctcccttttcactgttgctttctatgtatagctccctagacctttcacttttttaaaaacgcgttttgtgtagagaataaggaacgtggatctttttattttgcaatcctgggccagctagaagccaggagctgattgaccttttaacttttttcagtggccacattttggttatcgatgtacctagaagtatgtaaattagattaaatttctcttctggaaacaccctggggcaggcggccagcgtgtgtttttctgtcaagtggacaggctggcattggctggcagccggggctgggatcggggcctcctctgtccagagcgccatggaggccctgggttttccagttggccgccaagccgaccagacgcagctggggatgagcccaagttcccagctgttggctctttaggccatggctgggagggggtctctggctggctggcaaagcggctccagtgagcagatgaaccagggttctgggcagcctgtctgggaagggagccaggatcaagaagcagttgaggctagaggagcttatcaaaggcaggagctaccagcgagggtgtcagggacccgttgggagcatttgggtgggggccagtggggttgtagagagctggaactcacctgcttttaatacatgtgacttctagtgagacacatgcacccctgacccaaggaacatgcggggaaaagaggagccactggctcctttgcgatgttatttattttctcgctctgcaaatgtttattgaacatttctgagattttaagagattttgttggctgctccttcttgtttattgcatgtggtttttcagctcatcgtttttactaaacggtcaagtgctggagagtgggaacgacctcatggcgtgtggacagaaggggccacctctacccccagccctgctttctgggccctcccaccataccccttcctgggaaggagggattaacaggctgcaataacgcccacaagggtggtcttggcccacacgtctgctcctgtggggtcaggacgcacatctcgcctggtggcagaaggccgcaaccacttctctccatcctgtgctgtgggtgggtggatgtatccaggacttaggaagcagggagagcatcttgtgagctgactcaaaggtgtttcttcctctttcaacttttcataagtcagtttttatttttttattttattttttgagacagggtctcattttgttgcccaagctggagtgcagtgtagggacctcggctcgctgcagtctctgcctcctgggttcaagtgattctcctgcctcagccatccaggtagctgggatcacaggcatgcaccaccacccctggcttatatctgtaatttttgtagagacgggggtttcaccatgttgcccgggctggtcttgaactcctgagctcaagtgatcagcctcccaaagtgctgggattacaggcgtgagccactatgcccggcccgtaagtcagtttttgaaatataaaagtggtataggctagatgtgacaaaaaacagtcaaatgatacaagagcttataaagtcatatggcaagttcctccccaccaatcatgcagtgaagtgagggtcatgtgtgtccttggaagagtcacctccagttcttgcagggggatgttttcctaaaactttctgagcattgctcttctctgctcaagccacttcaatacacctcaggcagcaaagtctcagcttttgagccgtggtctctgagggtgttggatgtgaacgaaatcaaatcggtacaatgatgactgtggcaagtgcgatgaaggaacgaacctgcagggcgcagaagacgtgtcctggggccctgccttggtttggaagacaggcaggcatccctgaggctgatggggagatgaaccccgaagccagagtgcttatccgtcagatctctgcttcatgtttggagtttgctcacttaacacatcagaagtggctttgttccgtatggcagcaagttctgcagaagcctcatttgggtggggggagttttattaaaacagtttatcatggagaattccaactatacaaaagtagagcaaacagtaaaatggactctcatctatccatcaccaacccatgaccaatgtcttcagctgtcagagatttatcttatagctccttgcttcctcctcctctctctacctgtctgaattgtgtgaagcacatcctggccataagatcagttaacttcttagtatttcagtatgtttctctcaacgttgtaaatgccactattacacctaaagaaatcaacaatatcaaaaagaaacagcataccttaaaaaaagttttaaaacaca

SEQ ID NO: 3186 - DNA, 5957 bp, Homo sapiens
actcggcgctcagctgctcccgcctggggcggccgccccgcgtgcgccggagccaagatggccgcctccaccgcccagtgccgagtgacaaaagcggagagcaaggcggcggcggggccgcgcgcggggggcgcccgggagcgcgcgcccgcgggggcgcccccgcccagccccccgagcccgggccccgcggcaccccccgcgccgccgccgccgcccccacccccgccgccgccgccaccaccaccgccaccgccaccgccgccgcgggacgggcccaaggccgagccggagccggggcccgggcccgcgtccgctcccgcgcccggcctgggttctgaggaaaacgcaatggtggccatggacttgggctctccctcgctccctaagaagagcctgcctgtccctggggccctggagcaggtggccagtcggctgagcagcaaagtggctgcagaggttcctcatggcagcaaacaggagctgcaggacctcaaggcccagagcctgaccacctgcgaggtctgcggtgcctgctttgagacccgaaagggcctgtccagccacgcgcgctcccacctgcggcagctgggagtggcagagtcggaaagcagcggcgcacccatcgacctcctctacgagcttgtgaagcagaagggtctgcctgacgcccaccttgggctgcccccaggcctggctaagaagtccagctcactgaaggaggtggtcgccggggccccccggcccggcttgctcagcctggccaagcccttggatgcccctgctgtcaacaaagccatcaagtcgcctcccggcttctcggccaagggcctgggccacccgcccagctctccactcctcaaaaagacaccactggccctggcgggctcccctacccctaagaatcctgaggacaagagcccccagctgtccctgagcccccggccggcctccccaaaggcacagtggcctcagtctgaggatgaggggcccttgaacctcacctcaggcccagagccagcacgagacatccgctgcgagttctgtggtgagttcttcgagaaccgcaagggcctctcgagccacgcgcgctcccatctgcggcaaatgggcgtgaccgagtggtacgtcaatggctcgcccatcgacacgctgcgggagatcctgaagagacggacccagtctcggcctggtggacctcccaacccaccagggccaagcccaaaagccctggccaagatgatgggcggcgcaggtcctggcagctcactggaagcccgcagcccctcggaccttcacatctcacccttggccaagaagttgccaccaccaccgggcagccccctgggccactcaccaactgcctctcctcctcctacggcccgaaagatgttcccaggcctggctgcaccctccttgcccaagaagctgaagcctgaacaaatacgggtggagatcaagcgggagatgctgccgggggcccttcatggggaactgcacccatctgagggtccctggggggcaccacgggaagacatgacacccctgaacctgtcgtcccgggcagagccggtgcgcgacatccgctgtgagttctgcggcgagttcttcgagaaccgcaagggcctgtcgagtcacgcgcgctcacacctgcggcagatgggtgtgaccgagtggtccgtcaatggttcgcccatcgacacactgcgagagatcctcaagaagaagtccaagccgtgcctcatcaagaaggagccaccggctggagacctggcccctgccctggctgaggacgggcctcccaccgtggcccctgggcccgtgcagtccccactgccgctgtcgcccctggctggccggccaggcaaaccaggtgcagggccggcccaggttcctcgtgagctcagcctgacgcccatcactggggccaagccctcagccactggctacctgggctcagtggcagccaagcggcccctgcaggaggaccgcctcctcccagcagaggtcaaggccaagacctacatccagactgaactgcccttcaaggcaaagacccttcatgagaagacctcccactcctccaccgaggcctgctgcgagctgtgtggcctttactttgaaaaccgcaaggccctggccagccacgcacgggcacacctgcggcagttcggcgtgaccgagtggtgcgtcaatggctcgcccatcgagacactgagcgagtggatcaaacaccggccccagaaggtgggcgcctaccgcagctacatccagggcggccgccccttcaccaagaagttccgcagtgccggccatggccgtgacagtgacaagcggccgtccctggggctggcacccgggggcctggccgtggtcggccgcagtgccggaggggagccagggcccgaggctggccgggcagccgacggtggtgagcggcctctggcagccagcccgccaggcaccgtgaaggctgaggagcaccagcggcagaacatcaacaaatttgaacgccgacaagcccgccctccagatgcctccgcagcccggggaggcgaggacaccaatgacctacagcagaagctggaggaggtgcggcaacccccaccccgagtccggccagtcccctccctggtgccccggcccccccagacatcacttgtcaagttcgtgggcaacatctacaccctcaaatgcaggttctgtgaggtggaattccagggccccctctccatccaggaagagtgggtgcggcacttacagcggcacatcctggagatgaacttctccaaagcggaccccccacctgaggagtcccaggccccgcaggcacagacagcggcggcagaggctccctaacacaaaagcattccagatcccctctcgtgccacctctgtctcctcttcttcctcctctgtgtccttgtccctcttcctctttctttccgtttccaaaggagcaagccaaaacctcaaaccggcgccccttgggggccgggcacactacagccagggcgccgggagccagctagctgcccttcccccagcccgaggactctggggccacagggtgtcttccttcagcccatgcccacctggtccagcaggggcagcagccaggtctctgatggcagccggtctggtcacaggggaggacagcactcccccgtctagcagccaggcagggcgatgtctgccatccgtggccatttgcaaagaccccaaagacccctgttctggttccctctctcccccatgaatatcctctcacacacatgtacatgcgaacacacacaacacgcacctcgtgagacccgggacctgccccggacccccagttcctgggttgaacgaccacatcatgccacggtgcttgctcaggggaagccacgctccctctgtggggcctgctggggcctgggagccccccactgagcccacaatgccacggaaatccttgttggctgcccccgagaggggccttcccagctgggaagagctcagagctgacagctgcctcctgccatgtcaaggccccccaaagagcctcaggggctctggggccctggagggtggggttggggggtgggactctcctcccccactcctgctccctctcccttttcactgttgctttctatgtatagctccctagacctttcacttttttaaaaacgcgttttgtgtagagaataaggaacgtggatctttttattttgcaatcctgggccagctagaagccaggagctgattgaccttttaacttttttcagtggccacattttggttatcgatgtacctagaagtatgtaaattagattaaatttctcttctggaaacaccctggggcaggcggccagcgtgtgtttttctgtcaagtggacaggctggcattggctggcagccggggctgggatcggggcctcctctgtccagagcgccatggaggccctgggttttccagttggccgccaagccgaccagacgcagctggggatgagcccaagttcccagctgttggctctttaggccatggctgggagggggtctctggctggctggcaaagcggctccagtgagcagatgaaccagggttctgggcagcctgtctgggaagggagccaggatcaagaagcagttgaggctagaggagcttatcaaaggcaggagctaccagcgagggtgtcagggacccgttgggagcatttgggtgggggccagtggggttgtagagagctggaactcacctgcttttaatacatgtgacttctagtgagacacatgcacccctgacccaaggaacatgcggggaaaagaggagccactggctcctttgcgatgttatttattttctcgctctgcaaatgtttattgaacatttctgagattttaagagattttgttggctgctccttcttgtttattgcatgtggtttttcagctcatcgtttttactaaacggtcaagtgctggagagtgggaacgacctcatggcgtgtggacagaaggggccacctctacccccagccctgctttctgggccctcccaccataccccttcctgggaaggagggattaacaggctgcaataacgcccacaagggtggtcttggcccacacgtctgctcctgtggggtcaggacgcacatctcgcctggtggcagaaggccgcaaccacttctctccatcctgtgctgtgggtgggtggatgtatccaggacttaggaagcagggagagcatcttgtgagctgactcaaaggtgtttcttcctctttcaacttttcataagtcagtttttatttttttattttattttttgagacagggtctcattttgttgcccaagctggagtgcagtgtagggacctcggctcgctgcagtctctgcctcctgggttcaagtgattctcctgcctcagccatccaggtagctgggatcacaggcatgcaccaccacccctggcttatatctgtaatttttgtagagacgggggtttcaccatgttgcccgggctggtcttgaactcctgagctcaagtgatcagcctcccaaagtgctgggattacaggcgtgagccactatgcccggcccgtaagtcagtttttgaaatataaaagtggtataggctagatgtgacaaaaaacagtcaaatgatacaagagcttataaagtcatatggcaagttcctccccaccaatcatgcagtgaagtgagggtcatgtgtgtccttggaagagtcacctccagttcttgcagggggatgttttcctaaaactttctgagcattgctcttctctgctcaagccacttcaatacacctcaggcagcaaagtctcagcttttgagccgtggtctctgagggtgttggatgtgaacgaaatcaaatcggtacaatgatgactgtggcaagtgcgatgaaggaacgaacctgcagggcgcagaagacgtgtcctggggccctgccttggtttggaagacaggcaggcatccctgaggctgatggggagatgaaccccgaagccagagtgcttatccgtcagatctctgcttcatgtttggagtttgctcacttaacacatcagaagtggctttgttccgtatggcagcaagttctgcagaagcctcatttgggtggggggagttttattaaaacagtttatcatggagaattccaactatacaaaagtagagcaaacagtaaaatggactctcatctatccatcaccaacccatgaccaatgtcttcagctgtcagagatttatcttatagctccttgcttcctcctcctctctctacctgtctgaattgtgtgaagcacatcctggccataagatcagttaacttcttagtatttcagtatgtttctctcaacgttgtaaatgccactattacacctaaagaaatcaacaatatcaaaaagaaacagcataccttaaaaaaagttttaaaacaca

SEQ ID NO: 3187 - DNA, 8987 bp, Homo sapiens
gatttaaagggacaatgtcccccgagcggtggaggcggcggcggctgcggaggccgcggcaccggcaccgggagcggcagcggcggtagcggcagcgacggccgcaccaaggaggggagctccgagccccggcacctggccggcggcgccgcctccccggcccacaatgccccgctgagccggtgcagcagctgagtggatccaagcagagaaaatccgatggaggggtctctggcaggcagcctggctgcaccagatcgtccccaaggcccagagagactgcctggcccggcgccaagggagaacatcgagggtggggccgaagctgctgagggggaaggtggcatcttccggtccacccgttacctgcctgtcaccaaggagggcccccgagacattctggatggcagaggtggcatctctgacgggcagccccatcccggcctcagcgaagccctcccccgtgtcacctccgccacccatcggatcagcagctgctgctgggatggaggcagcctggacttccggccgggctccccaccaccccatctcctgggccatttcccaggtacccctgatggccgggggccctgggagcacccccttgtccaggaggctggggagggcatcctatctgagcggagattcgaggactcagtcattgtgagaaccatgaaaccccacgctgagctagagggctctagaaggttcttacaccaccggggggaaccaaggcttttggagaaacatgcccagggccgccccaggttcgactggctccaagatgaggacgagcagggatccccccaggacgcagggctgcacttggacctgcctgcccagccgccacccctcgcccccttcaggagggtgtttgtgccagtggaagacaccccgaagacgctggacatggcggtggtgggtggcagagaagatctggaggacctggaggggctggcccagccgtccgagtggggcctacccacgtcagcctcggaggtagccacacagacctggacagtgaactcggaggcttctgtggagcggctgcagccgctactgcccccgatccggaccgggccctacctgtgtgagctgctggaggaggtggccgaaggggtggccagcccagatgaggacgaggacgaggagccggccgtgttcccatgcatcgagtgcagcatctacttcaagcagaaggagcacctcctggagcacatgagccagcaccgccgagccccgggccaggagccccctgcggacctggccccgctggcctgcggggagtgtggctgggcctttgctgaccccactgccctggagcagcaccggcagctgcatcaggcctcccgggagaagatcattgaggagatccaaaagctgaagcaagttccaggagacgagggccgggaggcacggctgcagtgccctaagtgtgtctttggcaccaattcatccagggcctatgtgcagcatgccaagctgcacatgcgtgagcccccaggccagaccaccaaagagccttttggaggcagcagcggggctggcagccccagccctgaggccagcgccctcctctatcagccctacggagctgccgttggcctcagcgcctgtgtcttctgtggtttccccgcgcccagcgagagcctgctcagggagcacgtgaggctggtgcatgcccatccccactgggaggaggatggcgaggcttatgaggaagaccctgccagccagccaggcactagccaggatgctcacgcctgcttccctgacactgctgtggactactttggcaaagctgagccgtccttggcccccatgtggcgggagaaccctgctggatacgaccccagcctggcctttggcccaggatgccagcagctgagcatcagagatttcccgctgtcaaagccactcctgcatggcacgggccagaggcctctcggaaggctggcctttccctccacactagcatccaccccctactccttacagctcgggagaaacaaaagcaccgtccacccacaagggctgggggaacggaggcgcccttggagcgaagaggaggaggaggaggaggaggaggaggatgtagtgctgacctccgagatggatttttcccctgaaaatggggtcttttcacccctagccacccccagcctcatcccgcaggcggccctggagctgaagcaggcattccgagaggccctgcaggcagtagaggccacccaggggcagcagcagcagctccgagggatggtacccattgtgctcgtggcgaagctggggccgcaggtcatggcggcagccagggtgcccccaaggttgcagcccgaggagctggggctggcaggcgcccaccccctggacttcctgctcctggacgcgccgctgggcggcccgctggggctggacacactcctggatggggatccggccatggcactgaagcacgaggagcggaaatgcccctactgccccgatcgcttccacaacggcatcggcttggccaaccacgtccggggccacctgaaccgcgtgggcgtcagctacaatgtgcgccatttcatctccgctgaggaggtgaaggccattgagcgcaggttctccttccagaagaagaagaaaaaagtggccaactttgacccaggcaccttcagcctgatgcgctgtgacttctgcggggctggcttcgacacacgggccggcctctccagccacgcccgggcccacctacgtgacttcggtatcaccaactgggagctcactgtctcacccatcaacatcctgcaggagctgctggccacctctgctgctgagcagccccccagccccctgggccgagagcctgggggtccgcctggcagcttcctgacctcccgtcggccccgcttacctctcacggtgccctttccacccacctgggctgaggaccctgggccagcctatggagatggcctgggttctgaggaaaacgcaatggtggccatggacttgggctctccctcgctccctaagaagagcctgcctgtccctggggccctggagcaggtggccagtcggctgagcagcaaagtggctgcagaggttcctcatggcagcaaacaggagctgcaggacctcaaggcccagagcctgaccacctgcgaggtctgcggtgcctgctttgagacccgaaagggcctgtccagccacgcgcgctcccacctgcggcagctgggagtggcagagtcggaaagcagcggcgcacccatcgacctcctctacgagcttgtgaagcagaagggtctgcctgacgcccaccttgggctgcccccaggcctggctaagaagtccagctcactgaaggaggtggtcgccggggccccccggcccggcttgctcagcctggccaagcccttggatgcccctgctgtcaacaaagccatcaagtcgcctcccggcttctcggccaagggcctgggccacccgcccagctctccactcctcaaaaagacaccactggccctggcgggctcccctacccctaagaatcctgaggacaagagcccccagctgtccctgagcccccggccggcctccccaaaggcacagtggcctcagtctgaggatgaggggcccttgaacctcactttagatagtgacgggggcagagagctggactgccagctgtgcggtgcctggtttgagacccgcaagggcctgtctagccacgcccgtgcccacctgcgccacctgggcgtcagcgatccggacgccaagggatcccccatagacgtgctccacgggctcatcaggagggacggcgtccagatccgcctcccacccaggcgcggcgccctggcccacccggggcggccgcctcccacctccgcggccctctccttgcttccccccccaccgccggccaagaaggccaagctgaaggccgcgggtatggccagcccctgggggaagcaggacctctcggccgccgcagccgccggcattttctgggcctctgatgtggagccgtctcctctcaacctctcctcaggcccagagccagcacgagacatccgctgcgagttctgtggtgagttcttcgagaaccgcaagggcctctcgagccacgcgcgctcccatctgcggcaaatgggcgtgaccgagtggtacgtcaatggctcgcccatcgacacgctgcgggagatcctgaagagacggacccagtctcggcctggtggacctcccaacccaccagggccaagcccaaaagccctggccaagatgatgggcggcgcaggtcctggcagctcactggaagcccgcagcccctcggaccttcacatctcacccttggccaagaagttgccaccaccaccgggcagccccctgggccactcaccaactgcctctcctcctcctacggcccgaaagatgttcccaggcctggctgcaccctccttgcccaagaagctgaagcctgaacaaatacgggtggagatcaagcgggagatgctgccgggggcccttcatggggaactgcacccatctgagggtccctggggggcaccacgggaagacatgacacccctgaacctgtcgtcccgggcagagccggtgcgcgacatccgctgtgagttctgcggcgagttcttcgagaaccgcaagggcctgtcgagtcacgcgcgctcacacctgcggcagatgggtgtgaccgagtggtccgtcaatggttcgcccatcgacacactgcgagagatcctcaagaagaagtccaagccgtgcctcatcaagaaggagccaccggctggagacctggcccctgccctggctgaggacgggcctcccaccgtggcccctgggcccgtgcagtccccactgccgctgtcgcccctggctggccggccaggcaaaccaggtgcagggccggcccaggttcctcgtgagctcagcctgacgcccatcactggggccaagccctcagccactggctacctgggctcagtggcagccaagcggcccctgcaggaggaccgcctcctcccagcagaggtcaaggccaagacctacatccagactgaactgcccttcaaggcaaagacccttcatgagaagacctcccactcctccaccgaggcctgctgcgagctgtgtggcctttactttgaaaaccgcaaggccctggccagccacgcacgggcacacctgcggcagttcggcgtgaccgagtggtgcgtcaatggctcgcccatcgagacactgagcgagtggatcaaacaccggccccagaaggtgggcgcctaccgcagctacatccagggcggccgccccttcaccaagaagttccgcagtgccggccatggccgtgacagtgacaagcggccgtccctggggctggcacccgggggcctggccgtggtcggccgcagtgccggaggggagccagggcccgaggctggccgggcagccgacggtggtgagcggcctctggcagccagcccgccaggcaccgtgaaggctgaggagcaccagcggcagaacatcaacaaatttgaacgccgacaagcccgccctccagatgcctccgcagcccggggaggcgaggacaccaatgacctacagcagaagctggaggaggtgcggcaacccccaccccgagtccggccagtcccctccctggtgccccggcccccccagacatcacttgtcaagttcgtgggcaacatctacaccctcaaatgcaggttctgtgaggtggaattccagggccccctctccatccaggaagagtgggtgcggcacttacagcggcacatcctggagatgaacttctccaaagcggaccccccacctgaggagtcccaggccccgcaggcacagacagcggcggcagaggctccctaacacaaaagcattccagatcccctctcgtgccacctctgtctcctcttcttcctcctctgtgtccttgtccctcttcctctttctttccgtttccaaaggagcaagccaaaacctcaaaccggcgccccttgggggccgggcacactacagccagggcgccgggagccagctagctgcccttcccccagcccgaggactctggggccacagggtgtcttccttcagcccatgcccacctggtccagcaggggcagcagccaggtctctgatggcagccggtctggtcacaggggaggacagcactcccccgtctagcagccaggcagggcgatgtctgccatccgtggccatttgcaaagaccccaaagacccctgttctggttccctctctcccccatgaatatcctctcacacacatgtacatgcgaacacacacaacacgcacctcgtgagacccgggacctgccccggacccccagttcctgggttgaacgaccacatcatgccacggtgcttgctcaggggaagccacgctccctctgtggggcctgctggggcctgggagccccccactgagcccacaatgccacggaaatccttgttggctgcccccgagaggggccttcccagctgggaagagctcagagctgacagctgcctcctgccatgtcaaggccccccaaagagcctcaggggctctggggccctggagggtggggttggggggtgggactctcctcccccactcctgctccctctcccttttcactgttgctttctatgtatagctccctagacctttcacttttttaaaaacgcgttttgtgtagagaataaggaacgtggatctttttattttgcaatcctgggccagctagaagccaggagctgattgaccttttaacttttttcagtggccacattttggttatcgatgtacctagaagtatgtaaattagattaaatttctcttctggaaacaccctggggcaggcggccagcgtgtgtttttctgtcaagtggacaggctggcattggctggcagccggggctgggatcggggcctcctctgtccagagcgccatggaggccctgggttttccagttggccgccaagccgaccagacgcagctggggatgagcccaagttcccagctgttggctctttaggccatggctgggagggggtctctggctggctggcaaagcggctccagtgagcagatgaaccagggttctgggcagcctgtctgggaagggagccaggatcaagaagcagttgaggctagaggagcttatcaaaggcaggagctaccagcgagggtgtcagggacccgttgggagcatttgggtgggggccagtggggttgtagagagctggaactcacctgcttttaatacatgtgacttctagtgagacacatgcacccctgacccaaggaacatgcggggaaaagaggagccactggctcctttgcgatgttatttattttctcgctctgcaaatgtttattgaacatttctgagattttaagagattttgttggctgctccttcttgtttattgcatgtggtttttcagctcatcgtttttactaaacggtcaagtgctggagagtgggaacgacctcatggcgtgtggacagaaggggccacctctacccccagccctgctttctgggccctcccaccataccccttcctgggaaggagggattaacaggctgcaataacgcccacaagggtggtcttggcccacacgtctgctcctgtggggtcaggacgcacatctcgcctggtggcagaaggccgcaaccacttctctccatcctgtgctgtgggtgggtggatgtatccaggacttaggaagcagggagagcatcttgtgagctgactcaaaggtgtttcttcctctttcaacttttcataagtcagtttttatttttttattttattttttgagacagggtctcattttgttgcccaagctggagtgcagtgtagggacctcggctcgctgcagtctctgcctcctgggttcaagtgattctcctgcctcagccatccaggtagctgggatcacaggcatgcaccaccacccctggcttatatctgtaatttttgtagagacgggggtttcaccatgttgcccgggctggtcttgaactcctgagctcaagtgatcagcctcccaaagtgctgggattacaggcgtgagccactatgcccggcccgtaagtcagtttttgaaatataaaagtggtataggctagatgtgacaaaaaacagtcaaatgatacaagagcttataaagtcatatggcaagttcctccccaccaatcatgcagtgaagtgagggtcatgtgtgtccttggaagagtcacctccagttcttgcagggggatgttttcctaaaactttctgagcattgctcttctctgctcaagccacttcaatacacctcaggcagcaaagtctcagcttttgagccgtggtctctgagggtgttggatgtgaacgaaatcaaatcggtacaatgatgactgtggcaagtgcgatgaaggaacgaacctgcagggcgcagaagacgtgtcctggggccctgccttggtttggaagacaggcaggcatccctgaggctgatggggagatgaaccccgaagccagagtgcttatccgtcagatctctgcttcatgtttggagtttgctcacttaacacatcagaagtggctttgttccgtatggcagcaagttctgcagaagcctcatttgggtggggggagttttattaaaacagtttatcatggagaattccaactatacaaaagtagagcaaacagtaaaatggactctcatctatccatcaccaacccatgaccaatgtcttcagctgtcagagatttatcttatagctccttgcttcctcctcctctctctacctgtctgaattgtgtgaagcacatcctggccataagatcagttaacttcttagtatttcagtatgtttctctcaacgttgtaaatgccactattacacctaaagaaatcaacaatatcaaaaagaaacagcataccttaaaaaaagttttaaaacaca

SEQ ID NO: 3188 - DNA, 6356 bp, Homo sapiens
actcggcgctcagctgctcccgcctggggcggccgccccgcgtgcgccggagccaagatggccgcctccaccgcccagtgccgagtgacaaaagcggagagcaaggcggcggcggggccgcgcgcggggggcgcccgggagcgcgcgcccgcgggggcgcccccgcccagccccccgagcccgggccccgcggcaccccccgcgccgccgccgccgcccccacccccgccgccgccgccaccaccaccgccaccgccaccgccgccgcgggacgggcccaaggccgagccggagccggggcccgggcccgcgtccgctcccgcgcccggcctgggttctgaggaaaacgcaatggtggccatggacttgggctctccctcgctccctaagaagagcctgcctgtccctggggccctggagcaggtggccagtcggctgagcagcaaagtggctgcagaggttcctcatggcagcaaacaggagctgcaggacctcaaggcccagagcctgaccacctgcgaggtctgcggtgcctgctttgagacccgaaagggcctgtccagccacgcgcgctcccacctgcggcagctgggagtggcagagtcggaaagcagcggcgcacccatcgacctcctctacgagcttgtgaagcagaagggtctgcctgacgcccaccttgggctgcccccaggcctggctaagaagtccagctcactgaaggaggtggtcgccggggccccccggcccggcttgctcagcctggccaagcccttggatgcccctgctgtcaacaaagccatcaagtcgcctcccggcttctcggccaagggcctgggccacccgcccagctctccactcctcaaaaagacaccactggccctggcgggctcccctacccctaagaatcctgaggacaagagcccccagctgtccctgagcccccggccggcctccccaaaggcacagtggcctcagtctgaggatgaggggcccttgaacctcactttagatagtgacgggggcagagagctggactgccagctgtgcggtgcctggtttgagacccgcaagggcctgtctagccacgcccgtgcccacctgcgccacctgggcgtcagcgatccggacgccaagggatcccccatagacgtgctccacgggctcatcaggagggacggcgtccagatccgcctcccacccaggcgcggcgccctggcccacccggggcggccgcctcccacctccgcggccctctccttgcttccccccccaccgccggccaagaaggccaagctgaaggccgcgggtatggccagcccctgggggaagcaggacctctcggccgccgcagccgccggcattttctgggcctctgatgtggagccgtctcctctcaacctctcctcaggcccagagccagcacgagacatccgctgcgagttctgtggtgagttcttcgagaaccgcaagggcctctcgagccacgcgcgctcccatctgcggcaaatgggcgtgaccgagtggtacgtcaatggctcgcccatcgacacgctgcgggagatcctgaagagacggacccagtctcggcctggtggacctcccaacccaccagggccaagcccaaaagccctggccaagatgatgggcggcgcaggtcctggcagctcactggaagcccgcagcccctcggaccttcacatctcacccttggccaagaagttgccaccaccaccgggcagccccctgggccactcaccaactgcctctcctcctcctacggcccgaaagatgttcccaggcctggctgcaccctccttgcccaagaagctgaagcctgaacaaatacgggtggagatcaagcgggagatgctgccgggggcccttcatggggaactgcacccatctgagggtccctggggggcaccacgggaagacatgacacccctgaacctgtcgtcccgggcagagccggtgcgcgacatccgctgtgagttctgcggcgagttcttcgagaaccgcaagggcctgtcgagtcacgcgcgctcacacctgcggcagatgggtgtgaccgagtggtccgtcaatggttcgcccatcgacacactgcgagagatcctcaagaagaagtccaagccgtgcctcatcaagaaggagccaccggctggagacctggcccctgccctggctgaggacgggcctcccaccgtggcccctgggcccgtgcagtccccactgccgctgtcgcccctggctggccggccaggcaaaccaggtgcagggccggcccaggttcctcgtgagctcagcctgacgcccatcactggggccaagccctcagccactggctacctgggctcagtggcagccaagcggcccctgcaggaggaccgcctcctcccagcagaggtcaaggccaagacctacatccagactgaactgcccttcaaggcaaagacccttcatgagaagacctcccactcctccaccgaggcctgctgcgagctgtgtggcctttactttgaaaaccgcaaggccctggccagccacgcacgggcacacctgcggcagttcggcgtgaccgagtggtgcgtcaatggctcgcccatcgagacactgagcgagtggatcaaacaccggccccagaaggtgggcgcctaccgcagctacatccagggcggccgccccttcaccaagaagttccgcagtgccggccatggccgtgacagtgacaagcggccgtccctggggctggcacccgggggcctggccgtggtcggccgcagtgccggaggggagccagggcccgaggctggccgggcagccgacggtggtgagcggcctctggcagccagcccgccaggcaccgtgaaggctgaggagcaccagcggcagaacatcaacaaatttgaacgccgacaagcccgccctccagatgcctccgcagcccggggaggcgaggacaccaatgacctacagcagaagctggaggaggtgcggcaacccccaccccgagtccggccagtcccctccctggtgccccggcccccccagacatcacttgtcaagttcgtgggcaacatctacaccctcaaatgcaggttctgtgaggtggaattccagggccccctctccatccaggaagagtgggtgcggcacttacagcggcacatcctggagatgaacttctccaaagcggaccccccacctgaggagtcccaggccccgcaggcacagacagcggcggcagaggctccctaacacaaaagcattccagatcccctctcgtgccacctctgtctcctcttcttcctcctctgtgtccttgtccctcttcctctttctttccgtttccaaaggagcaagccaaaacctcaaaccggcgccccttgggggccgggcacactacagccagggcgccgggagccagctagctgcccttcccccagcccgaggactctggggccacagggtgtcttccttcagcccatgcccacctggtccagcaggggcagcagccaggtctctgatggcagccggtctggtcacaggggaggacagcactcccccgtctagcagccaggcagggcgatgtctgccatccgtggccatttgcaaagaccccaaagacccctgttctggttccctctctcccccatgaatatcctctcacacacatgtacatgcgaacacacacaacacgcacctcgtgagacccgggacctgccccggacccccagttcctgggttgaacgaccacatcatgccacggtgcttgctcaggggaagccacgctccctctgtggggcctgctggggcctgggagccccccactgagcccacaatgccacggaaatccttgttggctgcccccgagaggggccttcccagctgggaagagctcagagctgacagctgcctcctgccatgtcaaggccccccaaagagcctcaggggctctggggccctggagggtggggttggggggtgggactctcctcccccactcctgctccctctcccttttcactgttgctttctatgtatagctccctagacctttcacttttttaaaaacgcgttttgtgtagagaataaggaacgtggatctttttattttgcaatcctgggccagctagaagccaggagctgattgaccttttaacttttttcagtggccacattttggttatcgatgtacctagaagtatgtaaattagattaaatttctcttctggaaacaccctggggcaggcggccagcgtgtgtttttctgtcaagtggacaggctggcattggctggcagccggggctgggatcggggcctcctctgtccagagcgccatggaggccctgggttttccagttggccgccaagccgaccagacgcagctggggatgagcccaagttcccagctgttggctctttaggccatggctgggagggggtctctggctggctggcaaagcggctccagtgagcagatgaaccagggttctgggcagcctgtctgggaagggagccaggatcaagaagcagttgaggctagaggagcttatcaaaggcaggagctaccagcgagggtgtcagggacccgttgggagcatttgggtgggggccagtggggttgtagagagctggaactcacctgcttttaatacatgtgacttctagtgagacacatgcacccctgacccaaggaacatgcggggaaaagaggagccactggctcctttgcgatgttatttattttctcgctctgcaaatgtttattgaacatttctgagattttaagagattttgttggctgctccttcttgtttattgcatgtggtttttcagctcatcgtttttactaaacggtcaagtgctggagagtgggaacgacctcatggcgtgtggacagaaggggccacctctacccccagccctgctttctgggccctcccaccataccccttcctgggaaggagggattaacaggctgcaataacgcccacaagggtggtcttggcccacacgtctgctcctgtggggtcaggacgcacatctcgcctggtggcagaaggccgcaaccacttctctccatcctgtgctgtgggtgggtggatgtatccaggacttaggaagcagggagagcatcttgtgagctgactcaaaggtgtttcttcctctttcaacttttcataagtcagtttttatttttttattttattttttgagacagggtctcattttgttgcccaagctggagtgcagtgtagggacctcggctcgctgcagtctctgcctcctgggttcaagtgattctcctgcctcagccatccaggtagctgggatcacaggcatgcaccaccacccctggcttatatctgtaatttttgtagagacgggggtttcaccatgttgcccgggctggtcttgaactcctgagctcaagtgatcagcctcccaaagtgctgggattacaggcgtgagccactatgcccggcccgtaagtcagtttttgaaatataaaagtggtataggctagatgtgacaaaaaacagtcaaatgatacaagagcttataaagtcatatggcaagttcctccccaccaatcatgcagtgaagtgagggtcatgtgtgtccttggaagagtcacctccagttcttgcagggggatgttttcctaaaactttctgagcattgctcttctctgctcaagccacttcaatacacctcaggcagcaaagtctcagcttttgagccgtggtctctgagggtgttggatgtgaacgaaatcaaatcggtacaatgatgactgtggcaagtgcgatgaaggaacgaacctgcagggcgcagaagacgtgtcctggggccctgccttggtttggaagacaggcaggcatccctgaggctgatggggagatgaaccccgaagccagagtgcttatccgtcagatctctgcttcatgtttggagtttgctcacttaacacatcagaagtggctttgttccgtatggcagcaagttctgcagaagcctcatttgggtggggggagttttattaaaacagtttatcatggagaattccaactatacaaaagtagagcaaacagtaaaatggactctcatctatccatcaccaacccatgaccaatgtcttcagctgtcagagatttatcttatagctccttgcttcctcctcctctctctacctgtctgaattgtgtgaagcacatcctggccataagatcagttaacttcttagtatttcagtatgtttctctcaacgttgtaaatgccactattacacctaaagaaatcaacaatatcaaaaagaaacagcataccttaaaaaaagttttaaaacaca

SEQ ID NO: 3189 - DNA, 5695 bp, Homo sapiens
aaagggacaatgtcccccgagcggtggaggcggcggcggctgcggaggccgcggcaccggcaccgggagcggcagcggcggtagcggcagcgacggccgcaccaaggaggggagctccgagccccggcacctggccggcggcgccgcctccccggcccacaatgccccgctgagccggtgcagcagctgagtggatccaagcagagaaaatccgatggaggggtctctggcaggcagcctggctgcaccagatcgtccccaaggcccagagagactgcctggcccggcgccaagggagaacatcgagggtggggccgaagctgctgagggggaaggtggcatcttccggtccacccgttacctgcctgtcaccaaggagggcccccgagacattctggatggcagaggtggcatctctgtggccaactttgacccaggcaccttcagcctgatgcgctgtgacttctgcggggctggcttcgacacacgggccggcctctccagccacgcccgggcccacctacgtgacttcggtatcaccaactgggagctcactgtctcacccatcaacatcctgcaggagctgctggccacctctgctgctgagcagccccccagccccctgggccgagagcctgggggtccgcctggcagcttcctgacctcccgtcggccccgcttacctctcacggtgccctttccacccacctgggctgaggaccctgggccagcctatggagatgcctcaggcccagagccagcacgagacatccgctgcgagttctgtggtgagttcttcgagaaccgcaagggcctctcgagccacgcgcgctcccatctgcggcaaatgggcgtgaccgagtggtacgtcaatggctcgcccatcgacacgctgcgggagatcctgaagagacggacccagtctcggcctggtggacctcccaacccaccagggccaagcccaaaagccctggccaagatgatgggcggcgcaggtcctggcagctcactggaagcccgcagcccctcggaccttcacatctcacccttggccaagaagttgccaccaccaccgggcagccccctgggccactcaccaactgcctctcctcctcctacggcccgaaagatgttcccaggcctggctgcaccctccttgcccaagaagctgaagcctgaacaaatacgggtggagatcaagcgggagatgctgccgggggcccttcatggggaactgcacccatctgagggtccctggggggcaccacgggaagacatgacacccctgaacctgtcgtcccgggcagagccggtgcgcgacatccgctgtgagttctgcggcgagttcttcgagaaccgcaagggcctgtcgagtcacgcgcgctcacacctgcggcagatgggtgtgaccgagtggtccgtcaatggttcgcccatcgacacactgcgagagatcctcaagaagaagtccaagccgtgcctcatcaagaaggagccaccggctggagacctggcccctgccctggctgaggacgggcctcccaccgtggcccctgggcccgtgcagtccccactgccgctgtcgcccctggctggccggccaggcaaaccaggtgcagggccggcccaggttcctcgtgagctcagcctgacgcccatcactggggccaagccctcagccactggctacctgggctcagtggcagccaagcggcccctgcaggaggaccgcctcctcccagcagaggtcaaggccaagacctacatccagactgaactgcccttcaaggcaaagacccttcatgagaagacctcccactcctccaccgaggcctgctgcgagctgtgtggcctttactttgaaaaccgcaaggccctggccagccacgcacgggcacacctgcggcagttcggcgtgaccgagtggtgcgtcaatggctcgcccatcgagacactgagcgagtggatcaaacaccggccccagaaggtgggcgcctaccgcagctacatccagggcggccgccccttcaccaagaagttccgcagtgccggccatggccgtgacagtgacaagcggccgtccctggggctggcacccgggggcctggccgtggtcggccgcagtgccggaggggagccagggcccgaggctggccgggcagccgacggtggtgagcggcctctggcagccagcccgccaggcaccgtgaaggctgaggagcaccagcggcagaacatcaacaaatttgaacgccgacaagcccgccctccagatgcctccgcagcccggggaggcgaggacaccaatgacctacagcagaagctggaggaggtgcggcaacccccaccccgagtccggccagtcccctccctggtgccccggcccccccagacatcacttgtcaagttcgtgggcaacatctacaccctcaaatgcaggttctgtgaggtggaattccagggccccctctccatccaggaagagtgggtgcggcacttacagcggcacatcctggagatgaacttctccaaagcggaccccccacctgaggagtcccaggccccgcaggcacagacagcggcggcagaggctccctaacacaaaagcattccagatcccctctcgtgccacctctgtctcctcttcttcctcctctgtgtccttgtccctcttcctctttctttccgtttccaaaggagcaagccaaaacctcaaaccggcgccccttgggggccgggcacactacagccagggcgccgggagccagctagctgcccttcccccagcccgaggactctggggccacagggtgtcttccttcagcccatgcccacctggtccagcaggggcagcagccaggtctctgatggcagccggtctggtcacaggggaggacagcactcccccgtctagcagccaggcagggcgatgtctgccatccgtggccatttgcaaagaccccaaagacccctgttctggttccctctctcccccatgaatatcctctcacacacatgtacatgcgaacacacacaacacgcacctcgtgagacccgggacctgccccggacccccagttcctgggttgaacgaccacatcatgccacggtgcttgctcaggggaagccacgctccctctgtggggcctgctggggcctgggagccccccactgagcccacaatgccacggaaatccttgttggctgcccccgagaggggccttcccagctgggaagagctcagagctgacagctgcctcctgccatgtcaaggccccccaaagagcctcaggggctctggggccctggagggtggggttggggggtgggactctcctcccccactcctgctccctctcccttttcactgttgctttctatgtatagctccctagacctttcacttttttaaaaacgcgttttgtgtagagaataaggaacgtggatctttttattttgcaatcctgggccagctagaagccaggagctgattgaccttttaacttttttcagtggccacattttggttatcgatgtacctagaagtatgtaaattagattaaatttctcttctggaaacaccctggggcaggcggccagcgtgtgtttttctgtcaagtggacaggctggcattggctggcagccggggctgggatcggggcctcctctgtccagagcgccatggaggccctgggttttccagttggccgccaagccgaccagacgcagctggggatgagcccaagttcccagctgttggctctttaggccatggctgggagggggtctctggctggctggcaaagcggctccagtgagcagatgaaccagggttctgggcagcctgtctgggaagggagccaggatcaagaagcagttgaggctagaggagcttatcaaaggcaggagctaccagcgagggtgtcagggacccgttgggagcatttgggtgggggccagtggggttgtagagagctggaactcacctgcttttaatacatgtgacttctagtgagacacatgcacccctgacccaaggaacatgcggggaaaagaggagccactggctcctttgcgatgttatttattttctcgctctgcaaatgtttattgaacatttctgagattttaagagattttgttggctgctccttcttgtttattgcatgtggtttttcagctcatcgtttttactaaacggtcaagtgctggagagtgggaacgacctcatggcgtgtggacagaaggggccacctctacccccagccctgctttctgggccctcccaccataccccttcctgggaaggagggattaacaggctgcaataacgcccacaagggtggtcttggcccacacgtctgctcctgtggggtcaggacgcacatctcgcctggtggcagaaggccgcaaccacttctctccatcctgtgctgtgggtgggtggatgtatccaggacttaggaagcagggagagcatcttgtgagctgactcaaaggtgtttcttcctctttcaacttttcataagtcagtttttatttttttattttattttttgagacagggtctcattttgttgcccaagctggagtgcagtgtagggacctcggctcgctgcagtctctgcctcctgggttcaagtgattctcctgcctcagccatccaggtagctgggatcacaggcatgcaccaccacccctggcttatatctgtaatttttgtagagacgggggtttcaccatgttgcccgggctggtcttgaactcctgagctcaagtgatcagcctcccaaagtgctgggattacaggcgtgagccactatgcccggcccgtaagtcagtttttgaaatataaaagtggtataggctagatgtgacaaaaaacagtcaaatgatacaagagcttataaagtcatatggcaagttcctccccaccaatcatgcagtgaagtgagggtcatgtgtgtccttggaagagtcacctccagttcttgcagggggatgttttcctaaaactttctgagcattgctcttctctgctcaagccacttcaatacacctcaggcagcaaagtctcagcttttgagccgtggtctctgagggtgttggatgtgaacgaaatcaaatcggtacaatgatgactgtggcaagtgcgatgaaggaacgaacctgcagggcgcagaagacgtgtcctggggccctgccttggtttggaagacaggcaggcatccctgaggctgatggggagatgaaccccgaagccagagtgcttatccgtcagatctctgcttcatgtttggagtttgctcacttaacacatcagaagtggctttgttccgtatggcagcaagttctgcagaagcctcatttgggtggggggagttttattaaaacagtttatcatggagaattccaactatacaaaagtagagcaaacagtaaaatggactctcatctatccatcaccaacccatgaccaatgtcttcagctgtcagagatttatcttatagctccttgcttcctcctcctctctctacctgtctgaattgtgtgaagcacatcctggccataagatcagttaacttcttagtatttcagtatgtttctctcaacgttgtaaatgccactattacacctaaagaaatcaacaatatcaaaaagaaacagcataccttaaaaaaagttttaaaaca

SEQ ID NO: 3190 - DNA, 4067 bp, Homo sapiens
atggacttgggctctccctcgctccctaagaagagcctgcctgtccctggggccctggagcaggtggccagtcggctgagcagcaaagtggctgcagaggttcctcatggcagcaaacaggagctgcaggacctcaaggcccagagcctgaccacctgcgaggtctgcggtgcctgctttgagacccgaaagggcctgtccagccacgcgcgctcccacctgcggcagctgggagtggcagagtcggaaagcagcggcgcacccatcgacctcctctacgagcttgtgaagcagaagggtctgcctgacgcccaccttgggctgcccccaggcctggctaagaagtccagctcactgaaggaggtggtcgccggggccccccggcccggcttgctcagcctggccaagcccttggatgcccctgctgtcaacaaagccatcaagtcgcctcccggcttctcggccaagggcctgggccacccgcccagctctccactcctcaaaaagacaccactggccctggcgggctcccctacccctaagaatcctgaggacaagagcccccagctgtccctgagcccccggccggcctccccaaaggcacagtggcctcagtctgaggatgaggggcccttgaacctcacctcaggcccagagccagcacgagacatccgctgcgagttctgtggtgagttcttcgagaaccgcaagggcctctcgagccacgcgcgctcccatctgcggcaaatgggcgtgaccgagtggtacgtcaatggctcgcccatcgacacgctgcgggagatcctgaagagacggacccagtctcggcctggtggacctcccaacccaccagggccaagcccaaaagccctggccaagatgatgggcggcgcaggtcctggcagctcactggaagcccgcagcccctcggaccttcacatctcacccttggccaagaagttgccaccaccaccgggcagccccctgggccactcaccaactgcctctcctcctcctacggcccgaaagatgttcccaggcctggctgcaccctccttgcccaagaagctgaagcctgaacaaatacgggtggagatcaagcgggagatgctgccgggggcccttcatggggaactgcacccatctgagggtccctggggggcaccacgggaagacatgacacccctgaacctgtcgtcccgggcagagccggtgcgcgacatccgctgtgagttctgcggcgagttcttcgagaaccgcaagggcctgtcgagtcacgcgcgctcacacctgcggcagatgggtgtgaccgagtggtccgtcaatggttcgcccatcgacacactgcgagagatcctcaagaagaagtccaagccgtgcctcatcaagaaggagccaccggctggagacctggcccctgccctggctgaggacgggcctcccaccgtggcccctgggcccgtgcagtccccactgccgctgtcgcccctggctggccggccaggcaaaccaggtgcagggccggcccaggttcctcgtgagctcagcctgacgcccatcactggggccaagccctcagccactggctacctgggctcagtggcagccaagcggcccctgcaggaggaccgcctcctcccagcagaggtcaaggccaagacctacatccagactgaactgcccttcaaggcaaagacccttcatgagaagacctcccactcctccaccgaggcctgctgcgagctgtgtggcctttactttgaaaaccgcaaggccctggccagccacgcacgggcacacctgcggcagttcggcgtgaccgagtggtgcgtcaatggctcgcccatcgagacactgagcgagtggatcaaacaccggccccagaaggtgggcgcctaccgcagctacatccagggcggccgccccttcaccaagaagttccgcagtgccggccatggccgtgacagtgacaagcggccgtccctggggctggcacccgggggcctggccgtggtcggccgcagtgccggaggggagccagggcccgaggctggccgggcagccgacggtggtgagcggcctctggcagccagcccgccaggcaccgtgaaggctgaggagcaccagcggcagaacatcaacaaatttgaacgccgacaagcccgccctccagatgcctccgcagcccggggaggcgaggacaccaatgacctacagcagaagctggaggaggtgcggcaacccccaccccgagtccggccagtcccctccctggtgccccggcccccccagacatcacttgtcaagttcgtgggcaacatctacaccctcaaatgcaggttctgtgaggtggaattccagggccccctctccatccaggaagagtgggtgcggcacttacagcggcacatcctggagatgaacttctccaaagcggaccccccacctgaggagtcccaggccccgcaggcacagacagcggcggcagaggctccctaacacaaaagcattccagatcccctctcgtgccacctctgtctcctcttcttcctcctctgtgtccttgtccctcttcctctttctttccgtttccaaaggagcaagccaaaacctcaaaccggcgccccttgggggccgggcacactacagccagggcgccgggagccagctagctgcccttcccccagcccgaggactctggggccacagggtgtcttccttcagcccatgcccacctggtccagcaggggcagcagccaggtctctgatggcagccggtctggtcacaggggaggacagcactcccccgtctagcagccaggcagggcgatgtctgccatccgtggccatttgcaaagaccccaaagacccctgttctggttccctctctcccccatgaatatcctctcacacacatgtacatgcgaacacacacaacacgcacctcgtgagacccgggacctgccccggacccccagttcctgggttgaacgaccacatcatgccacggtgcttgctcaggggaagccacgctccctctgtggggcctgctggggcctgggagccccccactgagcccacaatgccacggaaatccttgttggctgcccccgagaggggccttcccagctgggaagagctcagagctgacagctgcctcctgccatgtcaaggccccccaaagagcctcaggggctctggggccctggagggtggggttggggggtgggactctcctcccccactcctgctccctctcccttttcactgttgctttctatgtatagctccctagacctttcacttttttaaaaacgcgttttgtgtagagaataaggaacgtggatctttttattttgcaatcctgggccagctagaagccaggagctgattgaccttttaacttttttcagtggccacattttggttatcgatgtacctagaagtatgtaaattagattaaatttctcttctggaaacaccctggggcaggcggccagcgtgtgtttttctgtcaagtggacaggctggcattggctggcagccggggctgggatcggggcctcctctgtccagagcgccatggaggccctgggttttccagttggccgccaagccgaccagacgcagctggggatgagcccaagttcccagctgttggctctttaggccatggctgggagggggtctctggctggctggcaaagcggctccagtgagcagatgaaccagggttctgggcagcctgtctgggaagggagccaggatcaagaagcagttgaggctagaggagcttatcaaaggcaggagctaccagcgagggtgtcagggacccgttgggagcatttgggtgggggccagtggggttgtagagagctggaactcacctgcttttaatacatgtgacttctagtgagacacatgcacccctgacccaaggaacatgcggggaaaagaggagccactggctcctttgcgatgttatttattttctcgctctgcaaatgtttattgaacatttctgagattttaagagattttgttggctgctccttcttgtttattgc

SEQ ID NO: 3191 - DNA, 4466 bp, Homo sapiens
atggacttgggctctccctcgctccctaagaagagcctgcctgtccctggggccctggagcaggtggccagtcggctgagcagcaaagtggctgcagaggttcctcatggcagcaaacaggagctgcaggacctcaaggcccagagcctgaccacctgcgaggtctgcggtgcctgctttgagacccgaaagggcctgtccagccacgcgcgctcccacctgcggcagctgggagtggcagagtcggaaagcagcggcgcacccatcgacctcctctacgagcttgtgaagcagaagggtctgcctgacgcccaccttgggctgcccccaggcctggctaagaagtccagctcactgaaggaggtggtcgccggggccccccggcccggcttgctcagcctggccaagcccttggatgcccctgctgtcaacaaagccatcaagtcgcctcccggcttctcggccaagggcctgggccacccgcccagctctccactcctcaaaaagacaccactggccctggcgggctcccctacccctaagaatcctgaggacaagagcccccagctgtccctgagcccccggccggcctccccaaaggcacagtggcctcagtctgaggatgaggggcccttgaacctcactttagatagtgacgggggcagagagctggactgccagctgtgcggtgcctggtttgagacccgcaagggcctgtctagccacgcccgtgcccacctgcgccacctgggcgtcagcgatccggacgccaagggatcccccatagacgtgctccacgggctcatcaggagggacggcgtccagatccgcctcccacccaggcgcggcgccctggcccacccggggcggccgcctcccacctccgcggccctctccttgcttccccccccaccgccggccaagaaggccaagctgaaggccgcgggtatggccagcccctgggggaagcaggacctctcggccgccgcagccgccggcattttctgggcctctgatgtggagccgtctcctctcaacctctcctcaggcccagagccagcacgagacatccgctgcgagttctgtggtgagttcttcgagaaccgcaagggcctctcgagccacgcgcgctcccatctgcggcaaatgggcgtgaccgagtggtacgtcaatggctcgcccatcgacacgctgcgggagatcctgaagagacggacccagtctcggcctggtggacctcccaacccaccagggccaagcccaaaagccctggccaagatgatgggcggcgcaggtcctggcagctcactggaagcccgcagcccctcggaccttcacatctcacccttggccaagaagttgccaccaccaccgggcagccccctgggccactcaccaactgcctctcctcctcctacggcccgaaagatgttcccaggcctggctgcaccctccttgcccaagaagctgaagcctgaacaaatacgggtggagatcaagcgggagatgctgccgggggcccttcatggggaactgcacccatctgagggtccctggggggcaccacgggaagacatgacacccctgaacctgtcgtcccgggcagagccggtgcgcgacatccgctgtgagttctgcggcgagttcttcgagaaccgcaagggcctgtcgagtcacgcgcgctcacacctgcggcagatgggtgtgaccgagtggtccgtcaatggttcgcccatcgacacactgcgagagatcctcaagaagaagtccaagccgtgcctcatcaagaaggagccaccggctggagacctggcccctgccctggctgaggacgggcctcccaccgtggcccctgggcccgtgcagtccccactgccgctgtcgcccctggctggccggccaggcaaaccaggtgcagggccggcccaggttcctcgtgagctcagcctgacgcccatcactggggccaagccctcagccactggctacctgggctcagtggcagccaagcggcccctgcaggaggaccgcctcctcccagcagaggtcaaggccaagacctacatccagactgaactgcccttcaaggcaaagacccttcatgagaagacctcccactcctccaccgaggcctgctgcgagctgtgtggcctttactttgaaaaccgcaaggccctggccagccacgcacgggcacacctgcggcagttcggcgtgaccgagtggtgcgtcaatggctcgcccatcgagacactgagcgagtggatcaaacaccggccccagaaggtgggcgcctaccgcagctacatccagggcggccgccccttcaccaagaagttccgcagtgccggccatggccgtgacagtgacaagcggccgtccctggggctggcacccgggggcctggccgtggtcggccgcagtgccggaggggagccagggcccgaggctggccgggcagccgacggtggtgagcggcctctggcagccagcccgccaggcaccgtgaaggctgaggagcaccagcggcagaacatcaacaaatttgaacgccgacaagcccgccctccagatgcctccgcagcccggggaggcgaggacaccaatgacctacagcagaagctggaggaggtgcggcaacccccaccccgagtccggccagtcccctccctggtgccccggcccccccagacatcacttgtcaagttcgtgggcaacatctacaccctcaaatgcaggttctgtgaggtggaattccagggccccctctccatccaggaagagtgggtgcggcacttacagcggcacatcctggagatgaacttctccaaagcggaccccccacctgaggagtcccaggccccgcaggcacagacagcggcggcagaggctccctaacacaaaagcattccagatcccctctcgtgccacctctgtctcctcttcttcctcctctgtgtccttgtccctcttcctctttctttccgtttccaaaggagcaagccaaaacctcaaaccggcgccccttgggggccgggcacactacagccagggcgccgggagccagctagctgcccttcccccagcccgaggactctggggccacagggtgtcttccttcagcccatgcccacctggtccagcaggggcagcagccaggtctctgatggcagccggtctggtcacaggggaggacagcactcccccgtctagcagccaggcagggcgatgtctgccatccgtggccatttgcaaagaccccaaagacccctgttctggttccctctctcccccatgaatatcctctcacacacatgtacatgcgaacacacacaacacgcacctcgtgagacccgggacctgccccggacccccagttcctgggttgaacgaccacatcatgccacggtgcttgctcaggggaagccacgctccctctgtggggcctgctggggcctgggagccccccactgagcccacaatgccacggaaatccttgttggctgcccccgagaggggccttcccagctgggaagagctcagagctgacagctgcctcctgccatgtcaaggccccccaaagagcctcaggggctctggggccctggagggtggggttggggggtgggactctcctcccccactcctgctccctctcccttttcactgttgctttctatgtatagctccctagacctttcacttttttaaaaacgcgttttgtgtagagaataaggaacgtggatctttttattttgcaatcctgggccagctagaagccaggagctgattgaccttttaacttttttcagtggccacattttggttatcgatgtacctagaagtatgtaaattagattaaatttctcttctggaaacaccctggggcaggcggccagcgtgtgtttttctgtcaagtggacaggctggcattggctggcagccggggctgggatcggggcctcctctgtccagagcgccatggaggccctgggttttccagttggccgccaagccgaccagacgcagctggggatgagcccaagttcccagctgttggctctttaggccatggctgggagggggtctctggctggctggcaaagcggctccagtgagcagatgaaccagggttctgggcagcctgtctgggaagggagccaggatcaagaagcagttgaggctagaggagcttatcaaaggcaggagctaccagcgagggtgtcagggacccgttgggagcatttgggtgggggccagtggggttgtagagagctggaactcacctgcttttaatacatgtgacttctagtgagacacatgcacccctgacccaaggaacatgcggggaaaagaggagccactggctcctttgcgatgttatttattttctcgctctgcaaatgtttattgaacatttctgagattttaagagattttgttggctgctccttcttgtttattgc

SEQ ID NO: 3192 - DNA, 603 bp, Homo sapiens
gtcccccctacctcggcgcgtcccgcggggtctcctgccccggggtgcacgggcggagggctcatcccccggaccctggacccccgaggagtgggcccgcgcggcgcagcccccacctctgcgacccctggggggcgtccgggcccacaatgccccgctgagccggtgcagcagctgagtggatccaagcagagaaaatccgatggaggggtctctggcaggcagcctggctgcaccagatcgtccccaaggcccagagagactgcctggcccggcgccaagggagaacatcgagggtggggccgaagctgctgagggggaaggtggcatcttccggtccacccgttacctgcctgtcaccaaggagggcccccgagacattctggatggcagaggtggcatctctgtggccaactttgacccaggcaccttcagcctgatgcgctgtgacttctgcggggctggcttcgacacacgggccggcctctccagccacgcccgggcccacctacgtgacttcggtatcaccaactgggagctcactgtctcacccatcaacatcctgcaggagctgctggccacctctgctgctgagcagccccc

SEQ ID NO: 3193 - DNA, 3644 bp, Homo sapiens
ccgccgccgccgcccccacccccgccgccgccgccaccaccaccgccaccgccaccgccgccgcgggacgggcccaaggccgagccggagccggggcccgggcccgcgtccgctcccgcgcccggcctgggttctgaggaaaacgcaatggtggccatggacttgggctctccctcgctccctaagaagagcctgcctgtccctggggccctggagcaggtggccagtcggctgagcagcaaagtggctgcagaggttcctcatggcagcaaacaggagctgcaggacctcaaggcccagagcctgaccacctgcgaggtctgcggtgcctgctttgagacccgaaagggcctgtccagccacgcgcgctcccacctgcggcagctgggagtggcagagtcggaaagcagcggcgcacccatcgacctcctctacgagcttgtgaagcagaagggtctgcctgacgcccaccttgggctgcccccaggcctggctaagaagtccagctcactgaaggaggtggtcgccggggccccccggcccggcttgctcagcctggccaagcccttggatgcccctgctgtcaacaaagccatcaagtcgcctcccggcttctcggccaagggcctgggccacccgcccagctctccactcctcaaaaagacaccactggccctggcgggctcccctacccctaagaatcctgaggacaagagcccccagctgtccctgagcccccggccggcctccccaaaggcacagtggcctcagtctgaggatgaggggcccttgaacctcacctcaggcccagagccagcacgagacatccgctgcgagttctgtggtgagttcttcgagaaccgcaagggcctctcgagccacgcgcgctcccatctgcggcaaatgggcgtgaccgagtggtacgtcaatggctcgcccatcgacacgctgcgggagatcctgaagagacggacccagtctcggcctggtggacctcccaacccaccagggccaagcccaaaagccctggccaagatgatgggcggcgcaggtcctggcagctcactggaagcccgcagcccctcggaccttcacatctcacccttggccaagaagttgccaccaccaccgggcagccccctgggccactcaccaactgcctctcctcctcctacggcccgaaagatgttcccaggcctggctgcaccctccttgcccaagaagctgaagcctgaacaaatacgggtggagatcaagcgggagatgctgccgggggcccttcatggggaactgcacccatctgagggtccctggggggcaccacgggaagacatgacacccctgaacctgtcgtcccgggcagagccggtgcgcgacatccgctgtgagttctgcggcgagttcttcgagaaccgcaagggcctgtcgagtcacgcgcgctcacacctgcggcagatgggtgtgaccgagtggtccgtcaatggttcgcccatcgacacactgcgagagatcctcaagaagaagtccaagccgtgcctcatcaagaaggagccaccggctggagacctggcccctgccctggctgaggacgggcctcccaccgtggcccctgggcccgtgcagtccccactgccgctgtcgcccctggctggccggccaggcaaaccaggtgcagggccggcccaggttcctcgtgagctcagcctgacgcccatcactggggccaagccctcagccactggctacctgggctcagtggcagccaagcggcccctgcaggaggaccgcctcctcccagcagaggtcaaggccaagacctacatccagactgaactgcccttcaaggcaaagacccttcatgagaagacctcccactcctccaccgaggcctgctgcgagctgtgtggcctttactttgaaaaccgcaaggccctggccagccacgcacgggcacacctgcggcagttcggcgtgaccgagtggtgcgtcaatggctcgcccatcgagacactgagcgagtggatcaaacaccggccccagaaggtgggcgcctaccgcagctacatccagggcggccgccccttcaccaagaagttccgcagtgccggccatggccgtgacagtgacaagcggccgtccctggggctggcacccgggggcctggccgtggtcggccgcagtgccggaggggagccagggcccgaggctggccgggcagccgacggtggtgagcggcctctggcagccagcccgccaggcaccgtgaaggctgaggagcaccagcggcagaacatcaacaaatttgaacgccgacaagcccgccctccagatgcctccgcagcccggggaggcgaggacaccaatgacctacagcagaagctggaggaggtgcggcaacccccaccccgagtccggccagtcccctccctggtgccccggcccccccagacatcacttgtcaagttcgtgggcaacatctacaccctcaaatgcaggttctgtgaggtggaattccagggccccctctccatccaggaagagtgggtgcggcacttacagcggcacatcctggagatgaacttctccaaagcggaccccccacctgaggagtcccaggccccgcaggcacagacagcggcggcagaggctccctaacacaaaagcattccagatcccctctcgtgccacctctgtctcctcttcttcctcctctgtgtccttgtccctcttcctctttctttccgtttccaaaggagcaagccaaaacctcaaaccggcgccccttgggggccgggcacactacagccagggcgccgggagccagctagctgcccttcccccagcccgaggactctggggccacagggtgtcttccttcagcccatgcccacctggtccagcaggggcagcagccaggtctctgatggcagccggtctggtcacaggggaggacagcactcccccgtctagcagccaggcagggcgatgtctgccatccgtggccatttgcaaagaccccaaagacccctgttctggttccctctctcccccatgaatatcctctcacacacatgtacatgcgaacacacacaacacgcacctcgtgagacccgggacctgccccggacccccagttcctgggttgaacgaccacatcatgccacggtgcttgctcaggggaagccacgctccctctgtggggcctgctggggcctgggagccccccactgagcccacaatgccacggaaatccttgttggctgcccccgagaggggccttcccagctgggaagagctcagagctgacagctgcctcctgccatgtcaaggccccccaaagagcctcaggggctctggggccctggagggtggggttggggggtgggactctcctcccccactcctgctccctctcccttttcactgttgctttctatgtatagctccctagacctttcacttttttaaaaacgcgttttgtgtagagaataaggaacgtggatctttttattttgcaatcctgggccagctagaagccaggagctgattgaccttttaacttttttcagtggccacattttggttatcgatgtacctagaagtatgtaaattagattaaatttctcttctggaaacaccctggg

SEQ ID NO: 3194 - DNA, 4609 bp, Homo sapiens
agaagcaggcggtgattgaaatgtgttgccggccttgtggggttccctaggtctgcggaacggcaccgtcgggggacggttggataacaggatgatactggagggattcttgtggttggagatcaggcctgggttctgaggaaaacgcaatggtggccatggacttgggctctccctcgctccctaagaagagcctgcctgtccctggggccctggagcaggtggccagtcggctgagcagcaaagtggctgcagaggttcctcatggcagcaaacaggagctgcaggacctcaaggcccagagcctgaccacctgcgaggtctgcggtgcctgctttgagacccgaaagggcctgtccagccacgcgcgctcccacctgcggcagctgggagtggcagagtcggaaagcagcggcgcacccatcgacctcctctacgagcttgtgaagcagaagggtctgcctgacgcccaccttgggctgcccccaggcctggctaagaagtccagctcactgaaggaggtggtcgccggggccccccggcccggcttgctcagcctggccaagcccttggatgcccctgctgtcaacaaagccatcaagtcgcctcccggcttctcggccaagggcctgggccacccgcccagctctccactcctcaaaaagacaccactggccctggcgggctcccctacccctaagaatcctgaggacaagagcccccagctgtccctgagcccccggccggcctccccaaaggcacagtggcctcagtctgaggatgaggggcccttgaacctcactttagatagtgacgggggcagagagctggactgccagctgtgcggtgcctggtttgagacccgcaagggcctgtctagccacgcccgtgcccacctgcgccacctgggcgtcagcgatccggacgccaagggatcccccatagacgtgctccacgggctcatcaggagggacggcgtccagatccgcctcccacccaggcgcggcgccctggcccacccggggcggccgcctcccacctccgcggccctctccttgcttccccccccaccgccggccaagaaggccaagctgaaggccgcgggtatggccagcccctgggggaagcaggacctctcggccgccgcagccgccggcattttctgggcctctgatgtggagccgtctcctctcaacctctcctcaggcccagagccagcacgagacatccgctgcgagttctgtggtgagttcttcgagaaccgcaagggcctctcgagccacgcgcgctcccatctgcggcaaatgggcgtgaccgagtggtacgtcaatggctcgcccatcgacacgctgcgggagatcctgaagagacggacccagtctcggcctggtggacctcccaacccaccagggccaagcccaaaagccctggccaagatgatgggcggcgcaggtcctggcagctcactggaagcccgcagcccctcggaccttcacatctcacccttggccaagaagttgccaccaccaccgggcagccccctgggccactcaccaactgcctctcctcctcctacggcccgaaagatgttcccaggcctggctgcaccctccttgcccaagaagctgaagcctgaacaaatacgggtggagatcaagcgggagatgctgccgggggcccttcatggggaactgcacccatctgagggtccctggggggcaccacgggaagacatgacacccctgaacctgtcgtcccgggcagagccggtgcgcgacatccgctgtgagttctgcggcgagttcttcgagaaccgcaagggcctgtcgagtcacgcgcgctcacacctgcggcagatgggtgtgaccgagtggtccgtcaatggttcgcccatcgacacactgcgagagatcctcaagaagaagtccaagccgtgcctcatcaagaaggagccaccggctggagacctggcccctgccctggctgaggacgggcctcccaccgtggcccctgggcccgtgcagtccccactgccgctgtcgcccctggctggccggccaggcaaaccaggtgcagggccggcccaggttcctcgtgagctcagcctgacgcccatcactggggccaagccctcagccactggctacctgggctcagtggcagccaagcggcccctgcaggaggaccgcctcctcccagcagaggtcaaggccaagacctacatccagactgaactgcccttcaaggcaaagacccttcatgagaagacctcccactcctccaccgaggcctgctgcgagctgtgtggcctttactttgaaaaccgcaaggccctggccagccacgcacgggcacacctgcggcagttcggcgtgaccgagtggtgcgtcaatggctcgcccatcgagacactgagcgagtggatcaaacaccggccccagaaggtgggcgcctaccgcagctacatccagggcggccgccccttcaccaagaagttccgcagtgccggccatggccgtgacagtgacaagcggccgtccctggggctggcacccgggggcctggccgtggtcggccgcagtgccggaggggagccagggcccgaggctggccgggcagccgacggtggtgagcggcctctggcagccagcccgccaggcaccgtgaaggctgaggagcaccagcggcagaacatcaacaaatttgaacgccgacaagcccgccctccagatgcctccgcagcccggggaggcgaggacaccaatgacctacagcagaagctggaggaggtgcggcaacccccaccccgagtccggccagtcccctccctggtgccccggcccccccagacatcacttgtcaagttcgtgggcaacatctacaccctcaaatgcaggttctgtgaggtggaattccagggccccctctccatccaggaagagtgggtgcggcacttacagcggcacatcctggagatgaacttctccaaagcggaccccccacctgaggagtcccaggccccgcaggcacagacagcggcggcagaggctccctaacacaaaagcattccagatcccctctcgtgccacctctgtctcctcttcttcctcctctgtgtccttgtccctcttcctctttctttccgtttccaaaggagcaagccaaaacctcaaaccggcgccccttgggggccgggcacactacagccagggcgccgggagccagctagctgcccttcccccagcccgaggactctggggccacagggtgtcttccttcagcccatgcccacctggtccagcaggggcagcagccaggtctctgatggcagccggtctggtcacaggggaggacagcactcccccgtctagcagccaggcagggcgatgtctgccatccgtggccatttgcaaagaccccaaagacccctgttctggttccctctctcccccatgaatatcctctcacacacatgtacatgcgaacacacacaacacgcacctcgtgagacccgggacctgccccggacccccagttcctgggttgaacgaccacatcatgccacggtgcttgctcaggggaagccacgctccctctgtggggcctgctggggcctgggagccccccactgagcccacaatgccacggaaatccttgttggctgcccccgagaggggccttcccagctgggaagagctcagagctgacagctgcctcctgccatgtcaaggccccccaaagagcctcaggggctctggggccctggagggtggggttggggggtgggactctcctcccccactcctgctccctctcccttttcactgttgctttctatgtatagctccctagacctttcacttttttaaaaacgcgttttgtgtagagaataaggaacgtggatctttttattttgcaatcctgggccagctagaagccaggagctgattgaccttttaacttttttcagtggccacattttggttatcgatgtacctagaagtatgtaaattagattaaatttctcttctggaaacaccctggggcaggcggccagcgtgtgtttttctgtcaagtggacaggctggcattggctggcagccggggctgggatcggggcctcctctgtccagagcgccatggaggccctgggttttccagttggccgccaagccgaccagacgcagctggggatgagcccaagttcccagctgttggctctttaggccatggctgggagggggtctctggctggctggcaaagcggctccagtgagcagatgaaccagggttctgggcagcctgtctgggaagggagccaggatcaagaagcagttgaggctagaggagcttatcaaaggcaggagctaccagcgagggtgtcagggacccgttgggagcatttgggtgggggccagtggggttgtagagagctggaactcacctgcttttaatacatgtgacttctagtgagacacatgcacccctgacccaaggaacatgcggggaaaagaggagccactggctcctttgcgatgttatttattttctcgctctgcaaatgtttattgaacatttctgagattttaagagattttgttggctgctc

SEQ ID NO: 3195 - DNA, 6299 bp, Homo sapiens
aaagggacaatgtcccccgagcggtggaggcggcggcggctgcggaggccgcggcaccggcaccgggagcggcagcggcggtagcggcagcgacggccgcaccaaggaggggagctccgagccccggcacctggccggcggcgccgcctccccggcccacaatgccccgctgagccggtgcagcagctgagtggatccaagcagagaaaatccgatggaggggtctctggcaggcagcctggctgcaccagatcgtccccaaggcccagagagactgcctggcccggcgccaagggagaacatcgagggtggggccgaagctgctgagggggaaggtggcatcttccggtccacccgttacctgcctgtcaccaaggagggcccccgagacattctggatggcagaggtggcatctctgacgggcagccccatcccggcctcagcgaagccctcccccgtgtcacctccgccacccatcggatcagcagctgctgctgggatggaggcagcctggacttccggccgggctccccaccaccccatctcctgggccatttcccaggtacccctgatggccgggggccctgggagcacccccttgtccaggaggctggggagggcatcctatctgagcggagattcgaggactcagtcattgtgagaaccatgaaaccccacgctgagctagagggctctagaaggttcttacaccaccggggggaaccaaggcttttggagaaacatgcccagggccgccccaggttcgactggctccaagatgaggacgagcagggatccccccaggacgcagggctgcacttggacctgcctgcccagccgccacccctcgcccccttcaggagggtgtttgtgccagtggaagacaccccgaagacgctggacatggcggtggtgggtggcagagaagatctggaggacctggaggggctggcccagccgtccgagtggggcctacccacgtcagcctcggaggtagccacacagacctggacagtgaactcggaggcttctgtggagcggctgcagccgctactgcccccgatccggaccgggccctacctgtgtgagctgctggaggaggtggccgaaggggtggccagcccagatgaggacgaggacgaggagccggccgtgttcccatgcatcgagtgcagcatctacttcaagcagaaggagcacctcctggagcacatgagccagcaccgccgagccccgggccaggagccccctgcggacctggccccgctggcctgcggggagtgtggctgggcctttgctgaccccactgccctggagcagcaccggcagctgcatcaggcctcccgggagaagatcattgaggagatccaaaagctgaagcaagttccaggagacgagggccgggaggcacggctgcagtgccctaagtgtgtctttggcaccaattcatccagggcctatgtgcagcatgccaagctgcacatgcgtgagcccccaggccagaccaccaaagagccttttggaggcagcagcggggctggcagccccagccctgaggccagcgccctcctctatcagccctacggagctgccgttggcctcagcgcctgtgtcttctgtggtttccccgcgcccagcgagagcctgctcagggagcacgtgaggctggtgcatgcccatccccactgggaggaggatggcgaggcttatgaggaagaccctgccagccagccaggcactagccaggatgctcacgcctgcttccctgacactgctgtggactactttggcaaagctgagccgtccttggcccccatgtggcgggagaaccctgctggatacgaccccagcctggcctttggcccaggatgccagcagctgagcatcagagatttcccgctgtcaaagccactcctgcatggcacgggccagaggcctctcggaaggctggcctttccctccacactagcatccaccccctactccttacagctcgggagaaacaaaagcaccgtccacccacaagggctgggggaacggaggcgcccttggagcgaagaggaggaggaggaggaggaggaggaggatgtagtgctgacctccgagatggatttttcccctgaaaatggggtcttttcacccctagccacccccagcctcatcccgcaggcggccctggagctgaagcaggcattccgagaggccctgcaggcagtagaggccacccaggggcagcagcagcagctccgagggatggtacccattgtgctcgtggcgaagctggggccgcaggtcatggcggcagccagggtgcccccaaggttgcagcccgaggagctggggctggcaggcgcccaccccctggacttcctgctcctggacgcgccgctgggcggcccgctggggctggacacactcctggatggggatccggccatggcactgaagcacgaggagcggaaatgcccctactgccccgatcgcttccacaacggcatcggcttggccaaccacgtccggggccacctgaaccgcgtgggcgtcagctacaatgtgcgccatttcatctccgctgaggaggtgaaggccattgagcgcaggttctccttccagaagaagaagaaaaaagtggccaactttgacccaggcaccttcagcctgatgcgctgtgacttctgcggggctggcttcgacacacgggccggcctctccagccacgcccgggcccacctacgtgacttcggtatcaccaactgggagctcactgtctcacccatcaacatcctgcaggagctgctggccacctctgctgctgagcagccccccagccccctgggccgagagcctgggggtccgcctggcagcttcctgacctcccgtcggccccgcttacctctcacggtgccctttccacccacctgggctgaggaccctgggccagcctatggagatgcccagagcctgaccacctgcgaggtctgcggtgcctgctttgagacccgaaagggcctgtccagccacgcgcgctcccacctgcggcagctgggagtggcagagtcggaaagcagcggcgcacccatcgacctcctctacgagcttgtgaagcagaagggtctgcctgacgcccaccttgggctgcccccaggcctggctaagaagtccagctcactgaaggaggtggtcgccggggccccccggcccggcttgctcagcctggccaagcccttggatgcccctgctgtcaacaaagccatcaagtcgcctcccggcttctcggccaagggcctgggccacccgcccagctctccactcctcaaaaagacaccactggccctggcgggctcccctacccctaagaatcctgaggacaagagcccccagctgtccctgagcccccggccggcctccccaaaggcacagtggcctcagtctgaggatgaggggcccttgaacctcacctcaggcccagagccagcacgagacatccgctgcgagttctgtggtgagttcttcgagaaccgcaagggcctctcgagccacgcgcgctcccatctgcggcaaatgggcgtgaccgagtggtacgtcaatggctcgcccatcgacacgctgcgggagatcctgaagagacggacccagtctcggcctggtggacctcccaacccaccagggccaagcccaaaagccctggccaagatgatgggcggcgcaggtcctggcagctcactggaagcccgcagcccctcggaccttcacatctcacccttggccaagaagttgccaccaccaccgggcagccccctgggccactcaccaactgcctctcctcctcctacggcccgaaagatgttcccaggcctggctgcaccctccttgcccaagaagctgaagcctgaacaaatacgggtggagatcaagcgggagatgctgccgggggcccttcatggggaactgcacccatctgagggtccctggggggcaccacgggaagacatgacacccctgaacctgtcgtcccgggcagagccggtgcgcgacatccgctgtgagttctgcggcgagttcttcgagaaccgcaagggcctgtcgagtcacgcgcgctcacacctgcggcagatgggtgtgaccgagtggtccgtcaatggttcgcccatcgacacactgcgagagatcctcaagaagaagtccaagccgtgcctcatcaagaaggagccaccggctggagacctggcccctgccctggctgaggacgggcctcccaccgtggcccctgggcccgtgcagtccccactgccgctgtcgcccctggctggccggccaggcaaaccaggtgcagggccggcccaggttcctcgtgagctcagcctgacgcccatcactggggccaagccctcagccactggctacctgggctcagtggcagccaagcggcccctgcaggaggaccgcctcctcccagcagaggtcaaggccaagacctacatccagactgaactgcccttcaaggcaaagacccttcatgagaagacctcccactcctccaccgaggcctgctgcgagctgtgtggcctttactttgaaaaccgcaaggccctggccagccacgcacgggcacacctgcggcagttcggcgtgaccgagtggtgcgtcaatggctcgcccatcgagacactgagcgagtggatcaaacaccggccccagaaggtgggcgcctaccgcagctacatccagggcggccgccccttcaccaagaagttccgcagtgccggccatggccgtgacagtgacaagcggccgtccctggggctggcacccgggggcctggccgtggtcggccgcagtgccggaggggagccagggcccgaggctggccgggcagccgacggtggtgagcggcctctggcagccagcccgccaggcaccgtgaaggctgaggagcaccagcggcagaacatcaacaaatttgaacgccgacaagcccgccctccagatgcctccgcagcccggggaggcgaggacaccaatgacctacagcagaagctggaggaggtgcggcaacccccaccccgagtccggccagtcccctccctggtgccccggcccccccagacatcacttgtcaagttcgtgggcaacatctacaccctcaaatgcaggttctgtgaggtggaattccagggccccctctccatccaggaagagtgggtgcggcacttacagcggcacatcctggagatgaacttctccaaagcggaccccccacctgaggagtcccaggccccgcaggcacagacagcggcggcagaggctccctaacacaaaagcattccagatcccctctcgtgccacctctgtctcctcttcttcctcctctgtgtccttgtccctcttcctctttctttccgtttccaaaggagcaagccaaaacctcaaaccggcgccccttgggggccgggcacactacagccagggcgccgggagccagctagctgcccttcccccagcccgaggactctggggccacagggtgtcttccttcagcccatgcccacctggtccagcaggggcagcagccaggtctctgatggcagccggtctggtcacaggggaggacagcactcccccgtctagcagccaggcagggcgatgtctgccatccgtggccatttgcaaagaccccaaagacccctgttctggttccctctctcccccatgaatatcctctcacacacatgtacatgcgaacacacacaacacgcacctcgtgagacccgggacctgccccggacccccagttcctgggttgaacgaccacatcatgccacggtgcttgctcaggggaagccacgctccctctgtggggcctgctggggcctgggagccccccactgagcccacaatgccacggaaatccttgttggctgcccccgagaggggccttcccagctgggaagagctcagagctgacagctgcctcctgccatgtcaaggccccccaaagagcctcaggggctctggggccctggagggtggggttggggggtgggactctcctcccccactcctgctccctctcccttttcactgttgctttctatgtatagctccctagacctttcacttttttaaaaacgcgttttgtgtagagaataaggaacgtggatctttttattttgcaatcctgggccagctagaagccaggagctgattgaccttttaacttttttcagtggccacattttggttatcgatgtacctagaagtatgtaaattagattaaatttctcttctggaaacaccc

SEQ ID NO: 3196 - DNA, 21 bp, Artificial Sequence
  source: /note="Description of Artificial Sequence: Synthetic oligonucleotide"
agcccacaatgccacggaaat

SEQ ID NO: 3197 - DNA, 21 bp, Artificial Sequence
  source: /note="Description of Artificial Sequence: Synthetic oligonucleotide"
gcaacatctacaccctcaaat

SEQ ID NO: 3198 - DNA, 21 bp, Artificial Sequence
  source: /note="Description of Artificial Sequence: Synthetic oligonucleotide"
tgaccgagtggtacgtcaatg

SEQ ID NO: 3199 - DNA, 21 bp, Artificial Sequence
  source: /note="Description of Artificial Sequence: Synthetic oligonucleotide"
agcggcagaacatcaacaaat

SEQ ID NO: 3200 - RNA, 65 nt, Artificial Sequence; identical to SEQ ID NO: 3132
  source: /note="Description of Artificial Sequence: Synthetic oligonucleotide"

SEQ ID NO: 3201 - DNA, 20 bp, Unknown
  source: /note="Description of Unknown: target sequence"
aacatctttcgggccgtagg

SEQ ID NO: 3202 - DNA, 20 bp, Unknown
  source: /note="Description of Unknown: target sequence"
cgggcacacctgcggcagtt

SEQ ID NO: 3203 - DNA, 20 bp, Unknown
  source: /note="Description of Unknown: target sequence"
tgcagcgtcccgggcagagc

SEQ ID NO: 3204 - DNA, 20 bp, Unknown
  source: /note="Description of Unknown: target sequence"
caagccgtgcctcatcaaga

SEQ ID NO: 3205 - DNA, 20 bp, Unknown
  source: /note="Description of Unknown: target sequence"
agtgggtgcggcacttacag

SEQ ID NO: 3206 - DNA, 19 bp, Artificial Sequence
  Synthetic oligonucleotide
ctacattttacatgatagg

SEQ ID NO: 3207 - RNA, 67 nt, Artificial Sequence; identical to SEQ ID NO: 3156
  Synthetic polynucleotide

SEQ ID NO: 3208 - protein, 11 aa, Artificial Sequence
  Synthetic polypeptide
VSGWRLFKKIS
